United States Patent Application Publication US 2023/0172999 A1 - sequence listing, part 9

SEQ ID NO: 11 - DNA, 3257680 bp, Barnesiella intestinihominis (residues 1-1,628,840 of 3,257,680)
  misc_feature (53602)..(53611): n is a, c, g, or t
  misc_feature (701076)..(701120): n is a, c, g, or t
  misc_feature (880193)..(880209): n is a, c, g, or t
  misc_feature (2073083)..(2073092): n is a, c, g, or t
  misc_feature (2165976)..(2166121): n is a, c, g, or t
  misc_feature (2440519)..(2440528): n is a, c, g, or t
  misc_feature (2441154)..(2441163): n is a, c, g, or t
  misc_feature (2452509)..(2452518): n is a, c, g, or t
  misc_feature (2952383)..(2952392): n is a, c, g, or t
  misc_feature (3241554)..(3241563): n is a, c, g, or t
ctaataagaagctgttttaaatttattaagaaataatattatcattgcaagcaggtatgttccggccatattgagcccctgtctcggaataaatttaaatagcttttaaatcgtttcacacgacaacccaaaggcttcggcaactgccggataaatgattttgccatcgacaatattcagtcctttatacaatgcctcatcttcggaacaagctttttgccaacctttattggctaattgaaccacataaggaagtgtagcatttgtcaaagccaatgtcgaagtcgcagaaacagcaccgggaatattggctacacaatagtgtattataccatcgacttcgtaaaccggttcggagtgagtcgtcggacgagaagtctcgaaacagccaccctgatcgatagccacatcgaccaatacagaacccttttccatcgtggacagcatatctctcgtaatcaaatgaggggctttcgcacccggaatcaatacagcacccactaccaaatcggtcgcaggaagctctgcacgaatattaaattcagaagaatataacgttttaatattagccggttttatttcatcgatatgccttaaacgcgacaaagaaaggtctgtgattgtcacgtcggctcccattccggcggcaatgcgagctgccgaataccccacgaccccggcgccaataaccaacacttttgcgggttttactcccggaacaccacccatcaattttccttttccaccttgcggtcgttctaaaaaacgcgcaccctcttgcgtcgccattcgtcctgccacttccgacataggaatcaacaaaggcaggctgtgatctttcaactctaccgtttcataggccaaacacgtggctccactcgacatcatggcctccgttaattttctatccgaagcaaaatggaaataggtaaacaacaattggcctttacggataagcggatattcaggagcaataggctcttttacctttacaatcatttcggagatagcatacacgtcttcaatagtcgccaatattttcgctccgactcgttcgtatgaactatccgggaaaccactattctccccggctcctttctggacatacaccgtatgcccatgtttcaccaactcattcactcctgccggagtcatgcctactcggttttcattgttcttgatttcttttggaattcctacaatcatagcctataagtattaagattagattaaattcggttgaaagataagaaaattattttttactttattacatcaacattcatttttttcgacaaaaaagggggaggttctgattcatcagagcctccccctctaaatatctatacagtaatgtatttaattcttcttgaccaacaaaaccgaaggcacagcccgctctccttcgtggtcgtatattccattatcgcaaggataattaataacaccatatccttgtatatacagcgtggaagaaccgccaccatctaaattaagagcatcggtcgcccccatttgccgagcgaatgtccgcaaatcatacagattcactcctttcgcaccatctaacctcccgtcaaaaactatcaacagcaccttattatcatcggtagtagccacgcaggtgcgaggatgcgtatcggtagtgaaagtattgctccacatagcgacatcacgaccgtcgtccaacatcaaaggccccgacacaacaacttgctgataatttccaccctgagcagcttcttccatcgaactccacttttttatttccacaacatctcccgtcgcacaaaaagctcccgtcgcacgtgtggaaaattcatttgtctgagtagcagccatcactgtaccattacacttcaaaaaatgacgactgatcccggtcgaagtattgaaatatgttccatttacagcggccaatgcgttagcagccaatgcccgatcgctagtcgtcttttttaacgaacctgcctcataagacaccaaaaaggaaacatcggctttattcaaatcgatttccaacatgcttatcgtttgaggataatcgaatagtaacggaacttgggccgttttactaattattcctgtctgaatttcccgttcctgccattgtattccggcaatggcaatcgaatcggcttgatttccgcccgatggcctttgcggaaccgacgaactaccatcatctttcccacacgaagacatacccgcaatcatcgacacaaccattacgggcaaaaacaacttactccatttcatcttccttgaactattgaagaaaccgtgtgaatatcaaaaattaaatttttcgagtttcatctcggaaagctctttcatctttcctacatacgaaacgaaatgagctgtctgttcatgaatcgacaacgcatcggcatctttccatgtctcgcaaatcatcaatacatcgggacgtgtactgctctcaaaaatatcatatgctacacaacccggctcctttaatgaacattctgtcaattttctcgctatatcaagaaccttatctcgacaagatttctctacctgaataaaaacattcaatctaatcataacttttcaatttattcgataccagttttgaactggtaaaagtaatatattctcctcataaaagagattgcgaaaaacaaatataactaaacaaattcttcaatctctaataaacgaagagccgcctctgcaacagatacggctcttccatctactatatttaattctatgtatttagaatggcaaatcatcggtaggagaaggcgccaaatcgggagctgccggagccggtgggaacggagttatatcgttgggcatcggaggcatatcgggaactccctgagcaacagaagctgacttttctatcttccaagctctcacatcggtgtaccaacgaccattaaattccctactttcaagatcaaagctaaccacgacatcttcgccgatagcggcaggatattgatctactttatcaccgaaaagattgaaacaaactttccgaggatattgctcttctgtttccaaaacatactcttgctttttccacggattgcctgctttcgaaacgccctcctgcaaaggcaacacatggattattcttcctttaatttccatattcaatttacaagctgtgtaattattcggcaacaaatatagcaaaaggtaaggggtaaggcaagatgaaaacaagtttttttcactccgttctgcccaaacttcattttatatcgcaaaagcagcgagacttccaataaaaacattttcacttttttatttgttatattacaaaaacctttctctataacatttattaaaaaggagttttaactaaaccctcaattttataacaagtcacctctcttgaaatcggaaaaatcgcattatctttgcaaactgagattatatattcaaacaaatgaaagaaaagcaattacttaaaaccatcgtagaaggcattcaagaaaaaaaaggaaagaaaattacaaccgtagatctctcaaaaatagaatcggcagccacctctcattttattatttgcgaaggacaatcgacaacccaagtcatggcgattgccgatagtataagagaatatgtattacaaaatacaggaataaaacctttcggatatgatggatatcaaaacggacaatggattgttatcgactacggtagcatattggcccatatttttttaccggaataccgaaattattataagctcgaacaattatggaatgatgccaaattggcagaaattcccgatgtggaataatttttgatacatcaacagcacattatatcatcaaaatatgggaaacaacaatatgtctccattaggacctaaaaagaaaggtattcgattcaatttgtattggatgtactcgctcatcgctctcgttttaataggactttactacatgaacgacaacacgatgagtaaagaagtgaattggaccgaattcgaaaaaatcgccaaagagggcggtataaccagactgaccgttttcgccaaaaaagattatgccgaagcccaactgaacgacagtacagccaaagcggtctttaaaactgacaaaataaacgggaaaccagtaatatacaccaatattccttcgggagacagttttgcaaaaactctcgatacgtggaaaaaggaagatggttttaatgcagaagtctattacgaaaacagtagtgacctaactaacatattatggtcggtaggcccattcatattactcattgtattttggatttatttagcccgccgaatgaccaatcaaggcggaggaggcagcggaggagtattcaatgtagggaaagccaaagctcaacttttcgataaagacggcgctgtaaaagtgacgttcaatgacgttgccggattatcggaagccaaacaagaagtcgaagaaatcgtagagtttctaaaaaatcccaatcgctataccgacttaggtggcaagatccccaaaggcgccttattggtaggccctccgggaaccggaaaaacattattggcaaaggccgttgccggagaagccaacgtcccgtttttctctttatctggttccgatttcgtagaaatgttcgtcggtgtgggagcctctcgtgttcgcgatcttttcagacaagccaaagagaaagctccgtgtatcgtctttatcgatgaaatcgatgctgtggggcgtgctcgggggaaaaatccgaatatgggttctaacgacgaacgagaaaatacattaaatcagttgctaaccgaaatggacggattcggctcgaacagcggagttatcattttggctgctaccaaccgagccgacatattggataaagcattgctgcgtgccggacgattcgaccgtcaaatctacgtagaactgcccgaattgaacgaccggaaagaaatatttaaagtccatttaaggaatgtaaaaatagacgattctgtcgatgtagaccttctggctcgacaaacccccggtttttcgggcgcggatatagccaatgtctgcaatgaggccgccctcatcgccgcccgaaaaaacaaaaaaagcgttcaacggcaagacttcatggatgctgtcgatcgtatcgtcggcggtctggaaaaacgatctaagattacaacccaagaggagaaacgctccattgccatacacgaagccgggcatgcttctatcagctggttattgagatatgccaaccccctcatcaaagtaacgatcgttcctcgcggacgtgcattgggagccgcatggtatctccccgaagaacgacaaatcacgacacgcgagcagatgctcgacgaaatgtgcgccacattaggaggtcgtgcagcagaagaagtatttctcggacgaatctcaaccggtgcttccaacgatttggagagggttaccaaacaggcttatgctatggtcgtttatttcggtatgagcgaaaaattaccgaatctttcttactatgattccacggggcaagaatacggatttaccaaaccgtatagcgaagacacggctaaactcatcgatgaagaagtaagcaaaatcgtaagcgaacaatacgaaagggctaaaaaaattctaaaagagaatgccgacaaacacgctcaactggcagaagtattgatctcccgtgaagttattttctcggaagatgtcgaacatatctttggaaaacgtccgtgggtatctcgctccgaagaaatcttgcaggacgaagaatcagcaaaacaagaaggagaaaaagccgagaaagaaacccaagaaaaagacacctcgacaggaaacgacaatacccatgaaagggaaaacaaaacggaggaaaaaccagagaaagattcggagaatacatagttttcaccaactccccctatataagaaaagaggtatcgacaagtcgatatctcttttttatgtcgcatcaccaaaaaagagccctaaataaacgtaagttttttcagagaatagttatatttgtcagcgatttatcaaaacaaaaaaatcgtgaaaaatttattgacccgaactttaaccggtatcctttttatcgttatcatcacaacggccgttctatcaggagcttatacatttctctttatattcggtatcatctcgctcctcggatatatcgaatttataaacctgactcaatttggcagaaagttcgataaaatattactcatgctcgacatggcaggagcctgtgccctatttctggctgtattttctttctcgggacaattaccatataacttccaaaaggcttctatcctcacctacgttatttacctcatcgcacgtcccgtcacgcaactttattcgacacccgaaaaatcgcccataaccagttgggcatatagcattttaggtcaaatttatgttgtactgcctctggccttattaggagtttggggatataagagcgactatcaactattcatgaataccgaatatttgctgatggctctttttgtattcgtatggacaaacgataccggcgcatatatcgtaggttgtacgttaggtaaacatcgactgttcgagcgcatatcgccaaagaagtcatgggaagggtttttcggaggtttggcattctgtatcatactcgcttctttggcaaactacatcataccgggtatgctttcgacagcccaatggataggtatgggaatcttaacctccatattttccacttggggagatttatgcgagtccttactcaaacgtacagcaggagtaaaagattccgggaaaatattgccgggacacgggggtattctcgatcgcttcgacagcgaattgatagcctcgcccgttatattcatatatctgactttcgttttataaccccgatgcttgcatcgacttcttttttacattaaatttgtaattattcaaatatccgcctatgaacgaccaacgttataatctgcgaggcgtatcggcttcaaaagaagatgtacataacgccataaaaaatatagataaaggaattttcccaaaagcgttttgcaaaattatacccgacatactcggaggagaccccgaatattgcaacatcatgcacgcagatggagcagggaccaaatcgtcattagcttacatgtattggaaggaaactggcgacctcggtgtatggagaggcatagcgcaagatgccctcatcatgaacatagacgatctgctctgcgtaggcgcgaccgacaatatactcgtgtcctcgacgatcggacggaataaactattagttcccggagaagtcatctcagcaatcataaacgggaccgaagaactcctcgccgaattgcgggacctcggagtaaacgcatatagtaccggaggcgaaacggccgatgtcggagatttggttcgaacaatcatagtcgatagcactgtcacttgtcgcatgaaacggaaagatgtcatatcgaatggcaatatccggccgggtgatgtcatagtaggattatcgtcctatggacaagcctcgtatgaaaaaagttataacggaggcatgggcagcaatggtttgacatcggcacgacacgatgtattcgggaaatatctcgcgaccaaataccccgaaagctatgacaatgcagttcctgacgaattggtatactcagggacattgaaacttacagacaaaatagccgaattaggaatagatgccggtaaactggtattgtcacctacacgaacatacgcccctgtcattaaaaaattgctcgacgagatgcggtcgcagatacacggtatggtacactgttcgggtggagctcaaaccaaaatcatgcatttcgtagagaagatgagagttgtcaagaacaacctctttccggttccgcctttgttcaatatcatacaggaacaatcgggaaccgactggcatgaaatgtacaaagtattcaacatggggcatcgcatggaaatctatgtagactcattgaatgctcaaaaagttatcgagatcagccattcattcggtatcgacgctcaaattgtaggatataccgaagcgtccgatcgcaacgagctaatcatcgaatcggacaaaggacgatttgaatatagataaattccgtttcacactttaactaaaacaactatgttaattataggaatagccggcggaaccggttcgggaaaaaccaccgttgtacgaaaaattatcgaaagcctacccgccggacaaactgccgttattccacaagattcctattattgggatagcagtcatatacccgtagaagaaagacaaaatatcaatttcgacgaaccggctgccatcgacttcgatttactggtaaaacatttgaaagaactgaaagcgggacactccatcgaacagcccatatattcgttcctgacatgtacccgctccaacgagacaataaccgtcgagccgcgcgatatagtcatcgtcgaaggtattcttattctttgcaatgaagagctccgaaacatgatggatatgaaagtattcgtcgatgcagatgccgacgaccgacttatcagagtcatcaatcgggatattatcgaacgaggacgtacggtcgagatggttatcgaacgctacgaacgggttttgaaaccgatgcatctgcaacatatcgaacctacaaaacgatatgccgacatcattatcccccaaggcggacacaactcggtggccatagaaatcatgaccaattttatttcccacaaacttaaaggttagaaatcatgcggagggcaatatcctattggatatatatactcttcgtgctgattttcgtctcggcttgtggaggaaacaaacagcactcgtcggaaaatgtcttgaacgatttcgattctatctgccagcgtggagaattacgtgtcttgacattgtatagttccacgtcctactttatttatcgtggagaagaaatgggatacgaatacgaacgtatcaaacaattcgcagatcactacaacctgaaaacgaaagtcatcgtcgctgacaatatcaagcgcctcaccgaaatgttgcaaaaaggcgagggtgatattatagcttatgaaatgcccattatcggcgatgccaagaatgaatggttatattgcggagcggaaaacatcactcaccaagtgctgattcaacttcgaaaacctaaaaacgaaatggttaacgacgttgtcgatttaatcgggaaagatatttatgtcgaagcaggatctaaatacgaagaccgaatcaaaaacctcaacgatgaactcggcggcgggatacatatacatcatatcgacaaagatacagtcgttaccgaggaacttatagaaatggtctctacgggagagataccttacactttggccgataataacctcgcgcaattgaatcgtacctactataacaacatagacattcatctgaaagtcagtttcccgcaaagagcttcatgggcggtaaacaagcattccaaatccctcgctcatgctataaaccaatgggtaaaggaaaaccacaaatcagactcttaccgaagtatttcccgcagatatttcgaactgagtaaaactttgccagcatcggccgtactatccatacccaaaggacaaatatctatctacgaccctcttttaaaaaaatatgccaagcaaatagattgggactggcgcatacttgctgcccaagcctataacgaatcccatttcgatactttggcggtatcgtgggccggagcgagagggcttatgcaactgatgcctcgtacggctcaggcattcggtgtttccatgaacgaaataaccaatcccgaaaaaaatatcggtgcggctgtaaaaagtatccaatctctcaacaagagtcttgccgatatcgaagataaaaatgaacgcataaaatttatattggctgcttataatggagggctcggacatatactcgacgctatggcgctcgctaagaaatatgggaaaaatccccatgtatgggataaaaacgtgagtgaattcattttacttaaaagcaaccctgaatatttcaatgacgaagtttgtaaatttggctatttcaaaggcagacaaaccgtagcctatgtccatgaagttttacgctattacaaaatataccaagaaaaaattcctttataaaaatcacattctctaaaaaattcgtatatttgtataaatagaatacaaaagtaagctatatcccgacataatcaataggaacatttgttttcattcttgtattattttgtacataaacatattactaacttaaaaattgaagttatgaaaaagaacaaattaaacatggttgttgccatagcgttgtgtgtatcgctgggtctttcttcttgtatcggatcatttaaattgactaataaagtactcggctggaacgaaggtgtaggcaataaattcgtaaacgaacttgtattcatcgcattccacattatccccgtatatgaattgacagtagttgccgatattcttgtattgaactccatcgaattttggagcggtgaaaatcttgtatctcaatcgacaaaagaagtaaaaggagaaaatggagatacttacttagtaacgaccgatgaaaacggttatacgattaccaatcaaaaagacaatacgactatcgggttcgtattcgatagcaatgacaactcttggtctgtttctgccaatggcgaaacgacgaagtttatgacattcgttgatgacaatcatgtaaaaatgccgggagtcgatggaaacgacatgatcatagaactctcgcaaacaggtgtaatggcttatcaagaagctgcacagcactttaattttgccatgaaataatcattagaccataacgcaaaaaagagggaagccgattaatcggcttccctcttttttgttcgaataaatggagagatatttttcaaaattcccgtctctccctcaacacgttattccaacgcaactttttccaaaatcaaaaccaaatggttccaaaatttctctaccgccggaatatgcatcatctcatcgggcgaatgaactccccgcaatgtaggcccaaatgaaatcatatcgagctgaggatatttcgttaaaaacaatccacactccaatccggcatgaatagccttgatagcaggtgtctgttggtataattcttgataagcctcgactgcaatatctttaatgcgagagtgcatattgggtttccagcccggatacccgtcgccatgagaaggttcagctccggccaaacggaacagacactcaacttgataagcgatatcgtatttctccgactctaccgaactgcgctgactggttgccacgacaatcttacccggctcggtcattttaacagatgccaaattggtcgaagtctccaccaagccctctatatcgtgactcatggctattactccgtgaggagctgcataaagagcgcttatcaaagcacgggcgactttatcctctatcataaattcaggagtatcggcagtcaccatgtccacagtcacatggggatcaactccgctcagttcagcagcgacatcggcagcataatgattcaactcggctcgaacagcctctttttcctcggggtttaccgcgatgacagccattgcctcccgcggtatggcattgcgtaaattaccaccgtcgatagcacacaaatgcacttcgtgacgttgcatacacaaccataaaaaacgagccaacaatttattggcgtttcctcgacccaaatgaatatccccgccggagtggcctcccaaaagattctttacctcgacacgtaaataaaatttaccggcgggtaacgcttcttgcttatatgtaaaagtcgacgtcgtatcgatacctccggcacagccgataaaaatctcggcttcatcttccgaatcgagattcaataaatatttgccatcgatcattccggactctaacccgaaagctcctgtcaagcccgtctcctcatcgaccgtaaacagagcttgtatccgtccgtgcttcaactcttcatcggcaagaacagccatagctgccgccatacctataccgttatcggctcctaatgtcgttccgcgagccttcacccattctccatctatatacgtttcgataggatctcgctcaaaatcatgcttcacatctccgtttttctcacacaccatatccatgtgagcttgcaatattaccgtaggagctccttcacaacccggagtagcttctttggtaataactacattcccggttttatcgacctttacttcaaggttctgctccttagcgaagttcaataaaaactcacgaatacgttcctcctttttcgaagggcggggaaccccggttatcgcatcaaaatagtgccaaattgatgtcggtttcagctcttttatgtccatactttttatattttagttgcaatttgatcactgctaaactttctgtattcgaagaaatttatgttaaaattcactcttttgccgattctgtcggcaaaatatttccattcttcgaccgaaatcacattttcctttcctatctttgcaaaacaaagataatgtaaaagcacaatcaatgagtttgtttttgctatatatcgcttatctttgttttactatacaaatatagtgaaaggtaagagaaggacaaaatggacaagtccatttttcactccgaacctcggtctatattcgatgtaatcaaatatagtcaaaatgtggaatattttactttttaccgtagggtttgttgcagtggctgtcgttcttttgggaataagagttttcttcgtgaaaggaggtcgtttcccgagttcgcacatcagcgacaaccggcatttacgaaataaaggaatcgtttgtgctgtatcgaccgatgccctagaacggaaaaaacgatctggtaaacgcaatataaatttttagactgataaatacgaattatgaaaacattcacccttgcaatccggattacaactgtggttgccctttctttattgatggtacaatgcggcaataaacaggctgctccgaaccaatccgtaagcgatgacactactatttcttcttacggagacaaactgcctatcgcctatattaatgtagattctttgctttcaaaatacaactatgccaaagatctaaatgaaaagatgatcaacaagcaagaaaacgcaagagcatccatcaacgaaaaagcgagacaattgaagaaagaacaagacgattttcaacgtaaatatcaaaataacgctttcctctctcccgaaagagcccaacaagaatatcaacgattggaaaaaaaggctgccgacttgcaagaatatgctcaaagattggaaaacgaaaatatgctggaacaacaaaaaatgttgatgcaaatgaacgactcgatcaatctctttatcaaagaatataataaagaaaagaaatacgaggctatcttcaataatgccagcacgctttatatcaatcctcaatatgacataaccaacgaagtggtcgaactattgaataagcgatatacttctgcaaagaaataaaaattaggaattaatctttttttacaaaacctgttaccgaaatgtagcaggttttattcatattataaaatgaaaaacatcttccatctcattattacagccggattagtttccatactccttgtttgttgccaatcccaagaaggaaaaaagcaaacagaatctttatacggaaaacaaatagtcgccatcggcaacagcatcacagcgcccaaagattcatgggcatggatcacagcccaacatttcgacatggaactaaccaacttagccgtgtcgggagcccaatggaccgactatcaagggacaactgtcgatacgaatccgaaacccgtatacgacggtgtacacacaaataatgtcatatccaatcaagtatatcggtttttacaactgatagtacccgaaggtgaaattatatcggaagccgaaagagaaaaattccatacttccacccctgctcctttgaccggattaaaaactaaaaattctacattcgacccgactattgtcattatatcctgcggaacgaacgatagttctaacggaaagcctatcggagatccatcggaactggacaagccctaccaagaggcagacagaaaaactttatatggagctataaactgggctgtctccatcattcgtaaatacagtcccgataccgaaatcgtattgctaactccgatccagcgttcttctcattcccaaaaattaccgatgtttgtcgatgctatcctgcttgccggagaaaaactgaactgtccggcaatcaacatgtatgaagaatcgggtattacagaagccgttgaagccaaagagcataaatatctttatgacggactgcatcccaacgctctcggacaacaattaatgggagaagtcgttatcaagcacttgatagatttatatgaaaataaacagtaataggcactacttcataaacgcccttcgtcgagataactgaaataaccatcttcaccaacaatgatgtggtcaagaaccgaaatatcgaataaagctgcagccgaccttattttttcggttaccctatcatcggcttgactgggattaagattattcgaagggtgattatgacacaaaataacagccgatgccaattgttgtaaagccgatcgcataactaattttacatcgaccaccgtcgcagaagttcccccttgactaactttgatcgtatctatcacccgattggcccgattaagtagcaagacccaaaactcttcatgaggcaagtctatcatctgtcctctcaataaattatatacatcagcactgccgcttatcgaaggtcgtctgggcaattcttcgtcacgacgccgccgacctatttcaagagcggccataatagtaatagccttagcttctcctattcccttaaatggctttacaaaatcgtccattccgtatttacccaagttgttcaagctgtttccagccgaattgagtatacgttgggagagttcaaccgctgtttcatcgacattgcccgaacctatcaaaattgctatgagttcggcgttactcaacgccctgataccgtgtagcatcatcttttcacgaggacggtcctcgattgcccattcggtaattttcagtttctctcttttcttgtccattgctattttccttttcgcaaacgcacctcttctgcctcgtccctacctctgcctaacagaactttataaaaaaacgctttcagaaaacccatgccatatccccccaactgtattatactggcgactaccgacaaagctgctattttcaaccgtttgttcacgcaccatgaaactaagaaaacagcaaacaaatatatcactaacggcaagatagccggccaccagaaaaaagaggcgattatcatggccaacgtgcctatgacaaaacatgccggaaaccaatgaaccagtttcaacgtatcaggatagagtaaataaagggaaatgcgcgacatgccgaagatataaatctgtctgaaaaacaaacgcatactaattcttcgtttatgatagacaaaagcatcgcgaataagagatataccaaaaccggcctgacgaatgcgggtactcatatcgatgtcttcactgaacatttctctaaatcccccgactcgagcataaacctctctcgaaaatcccatattgaatgttctcggcgtaaatttttcaagttgaacttttccgcctctgattcctcctgtcgtcaggaatgacgtcatcgagtaatttattgccttctgaacgtcactgaacgaatcgtgagcagcatcgggcccgccaaaacaatcggtataatgccgattcaatactgcatttaaagcctcgaaataaccttccggaatcacacaatccgaatcaaaaaaaatgaaataactccccacggctctttccagcccataattacgggctatacttcgaccctcgttttctttataataatagtgtatatccactatactggcatatcttttcacggcatcggcacaacataccgtcgaaccgtcttctactattatcacttcaaaatctttataggtctgtttcgacagactttccaaaagatcattgacctcgtcgggacgattatataccggaattatgatcgaaaaataaggcataacgacaattattcagtttgagacaaatatagagaaaggtgagcgcaaaggcaaacggaaatctcatttccgatttgactctgccgaaccgcatcctatattctacaaatatagtgaaagttgagtgcagagacaagaggaaatcatatttccagcttggttatgccgaaacgaatcctacattatacaaatataggtaaagtcgaatgcataaaaacaaacttgtttaagaagctgttttaaatttattgagaaataatattatcattgcaagcaggtatgttccggccatattgaacccctgtcttgcatcttgaatcccttgatttttgtcaatagcccgctattgactgcatatctcggactccaatctgcttcaacataggtctcaatctgtctcggaataaattaaaacagcttctaagatttttgtcgagacgcataccatattccataaaaaacagagaaaataaaaaacggagttcgcttatggtgaactccgtttcatacatcttatttagattaaatcttatttcgcacgttcgatataagaaccgtcgcgagtatctacaacaatcatctctcccgtttctataaaaagaggaacacgcaccgtagccccggtttccaccgtagccggtttagtcgtattggtcgctgtatcgcccttcaaaccgggttcggtataggtaacttccagctgcacctttacgggaagctcggcaaacaaaacagtttcggtagaagcatcggaaacgacttcgacaaccatgccttctttcaaaaagtctacccccgtaatcaagtccttattgatgataaggtcgtcccacgtttcttgattcaaaaaatgataatgttctccttcattataagagaattgatacggacgacgttctacacgaacatcttccagcttttcgcctatattgaaacggcgttcgagcactcgacccgataccacatctttcaatttggtacgcataatcgtattgcccttacccggttttacatgtaaaaattctacacagaaatagagttttccgtccaaacgaatacaagttccgtttttaatgtcttgcgagttaatcatacttgtctttattactttattttggatttatattattctttgtttctgacgattccaaatgcaaaagtaaattaaatcggtaaaatctcaaaaagaaaaccccaaaaatagattatctcttggtttattaaaaaaaagtatctatttttgcagtccgaaaaaagaataataacgataaaatataacggcaatgaaaagaacatttcaaccttcaaacagaaagagaataaataaacacggattccgcctgagaatgtcgactgccaatggtcgtcgtgtattagccagccgtcgcgccaaaggtcgtgctaaattgacggtatcggacgaaagacatcctttctaaaattttttattcgacatataaagaaagccgtatcgatcgatacggctttctttatatctatacttatgtaattccacacttccttagaacagaatattcgccgtcgctccccatgtgagagcatggatcgtacgatttttcgacgaaatatccatgatacccagttcggtagagggagacaagcccaacgaagtcgaggtagacgagtagtcgcaaaacagtcttgccccgaaattgcgcttcaacacataaccaaccgacacgcctgcactccaagcaaacccgttatttcccaattttatctcgtcacgaccaatcgagcggtccagtatataactatatccagccaacgccttacaccccaagttccaacgtcttgtaaaaggatatgagaaataagcccctgccataacccgactctcatctatcgcctctaacgtgacatcgggacgattattcagcgatacggggatattggacaccgtcgccaatccgccgcaacctatgtatttattgaaaaaataagctccttcgacacccatacggctacctatattcgtgtttattcgaagtccgttacctatatctatacttcccaacccggatataaaacccatataaagccctacaaacgagggattttccaacaaaggataataccggggagattcgaaattaagacctttatccttaaaaatcaaatcggccaaataatagcctaattccgttgaaagaataccgataccggctcccgccaacacatcggacaaccaatgccgattattcaatatccgactaattcccgtagccgttgcgactgtaaaagccgaaatgctataccacggactacgatcgccatactccttatgcatcatcatggccgccataaatgcagtagccgtatgccccgagggaaaggatttataattacttttatcgggtcgacgcacatgagccgtatatttaatggtattgacaaccgaagccattatagccacggaaaaagcatcggaaaccaacatacgtccccacgaactgcggctttccacaccgaatcctttcaaccctaacataactacggccggagcatattgcagataatcgtcataaccgtaatgaaaatttggaacaaaatcttctctaagttgacgaaaatgctcgctgccatgtttcaccgacaaaccggcaataaccaacggaactcccacgtaggtcatctggaaccacttcgcatcggtaattttatcggctttcctctgaaacggttgttcgtaaacgagcggtcttaaatcgacaatcgtatcgttaacctctgatttaggagcgaccgcacctactttaaataccgaagaagacagcaacccggtcaccaacaatcctgtaatgaatctcatcttatcgagcgattagaataatacaataaaaacggaacaaatttctattatttattccgtttatccaaaataaattaaatattttaaacccgttctaatttcccaagagacacataccaaataaatcccgacactcggtcatatcccatcttttcaatcaaggaagtataagtatttacttgtcttttgtatgaggcacgttccacattcccgaatttataatcgacaacaataacctcattgtccgtttcgacaacccggtcgggacgataaaacgaaccatcgggctgtaaaatttccctttccgtccacacgttcacccccggcgagaaccacgaactcacccgttcgtcggcaagccaacgatttatatcctcacgaatcgatttcgactccgactcggaaagctctcccgaacggacaaacgcagcaatcgtatcgtcgacgcgatcgagagtttctatctgactcaaaatgcgatgcatgagcgtaccgtatgtacgatccttcccctcaccgaaaacgcccttcccttgcaatcgcaagtgcaaccgatttcccggttcgatagagcgatatataccggcaggaaaagccggtacggcagaaacgtttttcttttttttctcggctcgccaatcgattccggcctcataacgaaggtcgccgccatcgttcccctccgggaacaacacttcacccaacattgccgagatactgccgaaacgccctttgtcgcttttatttttaacagccggagcaaaaatatgcaattcttcttccgcccgggtaaaagcgacataagcgatattcagattatcgatacaagcatacatcttttcatcgaaatactcggttgcgtagtaggtctgggccaaactgctaccatatcgtaacggtagcaccggaatacgagaaaaaggctcttcatgagtatgacaccagacaaaattggtttgattggactgatgatccaaactccaattacaaaaaggaatgattacgactttaaattcaaggcctttggatttatgtatagtcattacccgcatggcatcttgctcctgcggagtcgtcaccgacaacttatcctcattatcgtcccaccacgacaagaacgaacccaagtcggccgtatgtgtccgacaataatccaaaacataatcttgaaaagcctgtatatacacccgttcaccttcgtcagccccctcatctgaaaaataagaaacaatccgctcgcacatctcgaacaaaggctctttgcgaatactctcgacaaaggagaaaaaatcattatcgagatgcctcccgatgttctctctatcttcgaaataggacaaaataaccgcatcatcagacgccttgaattttcggctattatattcatagacagccaacagtcggttcaattcgatcgaaggatcttgaatatatctcaaaattcctatcaacaaattgattataggagagtttcttatcaacaacgactcactcgatataacgtcgtaacgataacgcccatcggtattctcagaattcagacgcaacaacaaatcgacaagcatggtcccttctctggcagttctcgtcaaaaacgttatgtcaccgggggtgtaccccctatcctgtaaatccctcaacaaatcgggaatacgagctaaggagtcgttataaaaatcctcctttttatccgattcccacatcgttacagaaacatgaccgctgcgcaaaagattcgaatcggcaactctctgcccgatatcggcataagccttttctatcttgacatcgaagctcccttcgaccaaagcagactcctcgatctctcgctctaacttctgctgtaacaaacgagcagcctcgccaaagattctattattaaactctactatacaggcacaactgcgatagttcatattcatagacctttcgctatactgcgacggtctgaacaacgactgaacgccttcattcaacaaagaccaatcggagttacgccaccgataaatgctctgtttcacatcacccacgatcaaatcggtgtggtcatggctcaaactctctcctatgagaggtgcgaagttttgccattgcagtttggaggtgtcttgaaactcgtcgatcataaaatggttgaccctcgtccctattttttcataaatgaacggggcatcgttctcgttgataaccgcattgagtataccggccgtatcggacaggagaagtacattatgttccttttcgtactcctcgatacggcggtctatatcgaccaatatccccaaagcataaatatacttcgaactttgtaccgctgtgttgtaacgcacataaggttctccgaaacaatttaccatttcctgcaacaccggattaagttcctcatagagactatctatacaagccggtatttcttttttcaaaaaccaaccgtcccgattgcccacatttgcccgaaaagtctgtgtcggaggctccacttttccatcgacaatttttttaagatactgaatccaagaacgccccttccccttaaaatcatcgggcgacaatccataacgttcgagtacagccatagctgcctctcccaatttccgtaaaagggactcgaactcgacacggatacggcgcatctctttcagataatcgtcaagaaccgacttatccttgatttgcgaaagtatctcgttacgaaacaatttataagtttctttcgatagctccccggccagttctctcaaatcgtctttccgttcggaccgatttcccaagctccaccagttccccgactctatacgctcctcggcataatgtatcagccagttgagaagacctttttggtcgatgtcggacaattcggaatacatgcggtctatggcagaagccgtaacgaaatcgttatccatctctatctcaaaactgccctgcaatccaatttcgcgggtaaaattccgaagcacttgttgaaagaaacggtcgatcgtgctgatattgaaataagaaaaatcgtgtaacaaaacatacagcgtctccgaagctataccccgaatctgttcaaccgtacaaccgaacagttgcatcaagccatcgacataaggcgacttctccgtatcgtgcgccaatatatcgagctggaaaacgatacgatgcttcatctcttcggtcgccttattggtaaatgtaaccgctaaaatacgtcgatgctgtgcatcgctcttccgatataaccggtaacgcccctgttcgtccctatatcccaacagcaatttaatatactccaatgtcagggtataagtcttacccgaaccggccgatgctttgtatatatgtaacataaaatcagataatgcgagctcgatacccttccgacaataaaatttccaacactttttgacggaaatctccctgaatcaatatatcgccttctttatcagaccctcctaccccgcacttggttttcaactttttcgccaaagccttcaaatcctcggcagtaccgacaaatccggtcacgagcgtaaccgattttccgtttctgttgcgtttatccaacgatatgcgcaactgttgtttccccggttccaaagtttcgggttcatcttcctcgccattatcgaatttgaaatcgggattcgtagaataaactacattcaatctgtctttccaatcattattttttttcatttcggtaattttatctcttctattaatttaggatataaaaggcaatctcgcatagttaaattcaaaaaccgttttcatttgcctctactcccgcctttcgctatatttgtagaatataggatgcgtttcggcatagccaaccccgaaatacaatttccgtttgtctctgctctcacctttcgctatatttgtcctcaaaaataataaagatagcgatacgaaacaacccgcatcgctttttattcagcaataaaccgagcgatttcccgttatataaaatacgatgaaagatattacgagacatcacgatatattctttgcaaaccgtttgtccttattgcgtatatggctgtgcataagcacgctcttttttaccatagagacatcgtttgcactcaaccccagccgttatgcgacccaatcgcaactcgccgacggatattgggtaaaagtggctgtttacgaatccggtattcaccaaatcacctatcgggaactccgtagatggggattttccgatccttcggccgtgaccgttttcggatacggaggcgccatgctacccgaaacattttctgagaacgatatagacgacctgaatcagttacccgtcatacgcaccgacagtaaaatattgttctacgcacaaggccccacttcatggtcgtataacgaaaaaaccaaagaatacgaccatgaacaaaacacatattctaccgcaggatattatttcctgaccgacagtaaaaatcaatcggcgaccatcgccgaacgggaagggggacaaacgaccggattacaggacataacttcattcgacgaacacgccgtgtacgaacaggaattatattctcccggttcgacaggacgattatttttaggcgacgatttccgttatacgacatctaagagttttacattcgaacttcccggtgtagacaattcctctcctgtaaaattaagaacttctttcggagcgaaaatattaggtggaactgccacacttgtctttacccgcaatggacaaactcttccatcgagcaacaccgacaatataggagcaggatcgagcagttcttatgacttcgtaagaatgacctcgacgctcaaagaaatcgacctcgacagcgaggaactggcttttacgctccttttccgccaaaacggaggttctctctctatggcccgtctcaattattttcggttcaactacaaaaggaaattgcaattatacaacggaagtatccaattccggctgggtcagctccctgcgaacagttgctataacctgcaaggatactcggcgacgactcatatctgggatatatcggatcctctgaatcccgtttctatcaaacccaacgtcaacaacggtaatgcacgtttcgtgcctacgaaaggaaatgaagaatacattgcattcgacgaacaagctaccgttgcctcggtagagtttattgaaaaagtacctaaccaaaatttacacggtttgacaacccccgacatggttattctcacgcccaaagaatatatctcctacgcccaaagcatcgctcgattgcataatgagaacgacggtatggaggtagctgtcatcgaccatgaaaccgtattcaacgaattctcctcgggaacacccgatgcgacagcctatcgacgactgatgaaaatgtttttcgatcgaaaaggcggcctcgatggagagcctttatacctgttgctttttggaaaaggattatacgataaccgaaaaataggagaaaccggtaaatatgtgaaataccccacactcctcacataccagcacggcagcggaacagacgaacgtcaatcctatacgacagacgattacttcggattcctcgacgacgattccgggaatagaatagcgtcggataaactccgtgtcaatataggccgtttgcccataaaaagcgaacaagaagccaaagatgtggtatccaaattatacaattacatagagaataacgataagggctcttggaaaaatcaggttcttgtcgtcgccgacgatgaaaattatgccattcacatggaacaggccgaagagatttgcagcattatggagaatagcgatgcccactgtttcatcaacaaagtctacacggatgcttacacggcagaaataggctccacgggacgaacatacccttcggccaagaaaaaattattacaaattttagatgacggcgttctcgtagtagattatataggtcacggcagtaccgtggcatggacacatgaagatttgttgaatataggcgacattcaatccatgtatttaaaaaggttgccactgtttatcacagcgacttgtgacttcggacgttacgatcacgaagaaacatcgggtggagaaatcctttgcctgaatccgaacggaggaggtatagccctcatcaccacgacccgagtcgtttatatcagcgacaatcactatctcaacagtggtgtagcgcaacaaatattcaaaaaaaatgaaaatcacgagtatccacgactcggcgacatattgcgtgaagcgaaatgcaacattgcacaaacagacagcaacaaattgaactacaccctattgggagatccggctctaaaattattataccccgattaccaaattaaggtaaccgaaataaacgggcatgacatcactcaaaccacaccgaccatacaagcgagagactccgtttctataaagggagagatatatacccccggcggagaaaaagcgaccgattataacggtatcatctgtccgacggtctatgattccgaagtaaccgtagtaacccacggctatggagaggaaggcaaagccatagaatttaaagaaaggagcaaccgcctttatgtgggaaaagactctatcgtcaacggcatttttgaaatttcattcaaagtcccgagagaaatcaactttgccgatgacaagggattgataaatctatattgctataacgatgaaggtcaagagggaaacggcaatgaatccaactttatcgtaggaggatttaacgacgactcgaacgaagattttgaaggtccgcagatatattctgcctacctcaactccgaagagttcaaatacggtgatacggtcaacgaatcgcctctgtttatggccgaggtgtatgatgaatcgggaataaacatatccgatgccggtatcgggcatcagatgactattaccttagacgataaaaccgtatataccgacgtatcttcttacttccaacctgcattgggcgaattcggcagagggtttatcgcataccctttgagcggactgagcgaaggggaacactctttacgattaaaagtgtgggacaccgaaaacaattcgtcggaaaccgaaataggctttacggtaaaggccggattaaaacctgttatttatgacttgtatgccgatcgtaacccggccagcacttcgacaaatttctatttgagacacaacagaccggatgccgtgataaacgtaaccatatcggtatataatctgatgggagtagaagtatggcgttatacggggaaaggcctctccgacatgtacaagtcttacccgattacatgggatttgaccgacggtagcggaactcgggttcccggtggtatctacttgtacaaagcgattatatcgaccgataacgaacacgaaaccactcgttcgaaaaaactctgtgtgaccggcagagaatagactgtttcttcgacaaggatatacatcgccgatcccttttaagggatcgagtaaaaaatatttgaaccaaatttcagtattttgttatatctttgtatatcaaacagtcaaaaagatgtataattcggaatcgaaatctacaattaaattaccggagccttcgcttcgcaggcttccgtggtatttggcttatataaaattgctacaaacaaaaggagaagaatatgtttcttccacacaaatagcaaaggaaataggcgtagattcgtcgaaaatagccaaagacctctcttttatcaatatttcggggaaaacacgtgtcggttatgaaataaattcgttagtcgcagtactggaagaatttctcggattcacgtctatgcacaaagcattcattttcggagttggaagtttgggggccgcgctcatgcaagattcgggattgtcgcaatacggtctcgaagtcgttgccgggttcgatgtcaaacccgagttgacaggaaccttcattaatcatattccggtatatcccctgtctcaattcactcaaaagcaaaaagagttgggtgtccaaataggaatattgaccgtcccgatagacaaagctcaaagtgcgacagaagagatgatagccggaggtatcaaagcgatttggaactttaccccttaccggattcgagttcccaaacatatagttattcaaaacacatctatttatgctcatttagccgttatgttcaatcggttaaataatatcaagtaaatctcatgaaaataattgccgtcggttggaattatagaggacacaatgcagagatgaaccaaaaagaaactcctcaaaatcccatcattttttttaaacccgaaacggctttactaaaagacgggaagccattttttttacctcaattctccgaccgtatcgaatacgaaaccgaattggttttccacatttcccgattagggaaaaacatagccagtaaatttgcacatcgatactacgactctgtaacggtaggcatcgacctcacggccagggacaagcaagccgaagcaagggcaaacggaaatccgtgggacattgcaaaaggattcgacaactcggctcccatcggaaaattcattccattacccgaacaaacacccaaagccgacaatataaatttctctttgtttataaacggagtaaaagtacaacaaggcaatagtcaagatatgattttccacatcgatgaactcatcgcttatatcagccaattctataccttgaaaataggagacctcatctttaccggaacaccggcaggagtaggacccgtaaaaataggagaccatctcgaagggtatttggaagaaacaaaagttcttgatttttttgttaaatagccattagtttataccaatgcctcatacgattaagcgaacacaaaaacaaagaatattatccattatagcttgtttttatattttactccaacctacatacggaagagatcgacaagactatgcggaaaactccatattagcggaaggcaattgggtaaagatatcgacaaccgatgcaggaatttaccaaataacagaagactctttgagggcttggggttttacagacccttcaaaaataaaactgttcggatatggaggaaccgtcatcgatgaactatttgcaaacagcgataactacatagacgacctaccgcaaattccactttggcggcataacaacaaactatatttttattcgcaaggcactaccaaatggtctttcgattctgccagtcaagaatttgtacatcggcttcacccctattctacatatgcctgctatttcctgacagatagaaacatcgaatcttccgactttcctaccatatcatcttccttaccgaccgaaatcgataccccgattaccgtattcgacgactatgccctacacgaaaaagaattaatatcggtaggcaaaacgggacaaaatttcttcggtgaagattttctatcgaattcgaatcaagacttcacgtttcacctatcgggagcacaaccctctccgataaaaataagagtatctttcggagcaaaaatcagtggaagcgaagggtatatacacatttcttacaatgggaccgaattaccgaccaatacctcgaacaaaatcacaaaatattacgatagccatgaatttcttcgagtagcttccccacttaaaacagtgaaccgagccgaggaagaatcaacgataagccttcgctacgccagtactggaacaaccctatcggcatatctcgattacatcagactcaattataaacgtaagttacaattatacaacgggcaagtctgctttcgttttatcaaccggcaaaccgacaattattaccaaatagaaaacagtacagccacaacattggtttgggacgtcactacgccccatagaccgaaaaacattacaacctcattcgataacaacacaacctcatttacaccagaagatgctcaactcagagagttcattgcgttcgacccggaacaaaattttccttctccgtccttcgtacggcaaatcgaaaaccaaaacttacacgcattgaatatccccgaactaacgatcatcaccccagcagcattacagacagaagccgaacgcgtagctcagctgcacagagaagaaggactaaccgtcgcagttattgaacaagaaaaaattttcaacgaattttcatcgggaacacccgatgcctcggcctatcgaagattaatgaaaatgttttacgacagagccgaaggtaatgaaaacgttcgtccgcgttatctgcttcttttcggagacggttcttacaacaaccgcaaatctatggaaaagttacattcacccgaatgcaacatgttacttacctaccaatcgaaaacaagtatcgacgaacgagaatcattcgttatagaagattatttcggtttcttggaaaacaattcgggcgaagaaataaaggtcgataaagtatgtttaggaatcggtcgttttcccatttcctcgattaaaaacgcacgattggtagtagataaactatatcgatatgtacacgacaaagacttctcctcatggaaaaacaatatctgcatagctgccgacgatggagacgaagcgatacacgccgaacaagccgatagaggaagtgacacccttttactcaaaaatacttctcaaccgagattgggattcagagtgaataaaatatacatcgactcctattacatggatccccaaacaaaaaaataccccgaagccaatcgggagttgatgaaacaattcaatgaaggtatgctcgtcttcaattatatagggcacaacgaccccgaagtaggatttaccggagaaggattattttcccgatatgaaatggaccatcttaccaatacgcggttacccctatttatcaccatcacatgcgactactgccaattcgatgccgaagacgtttcagccggagagaacgtattcctcaacccctctgccggagccatagccttaataacgactacccgtgtggtttataccgatggaaacgataagatcaatcaacgattaatgaagcgactcttagaacgggattccaatggttctcctttacgaatcggagatgttttaaaactggctaaacaagatttcaacaccgaaatcgacaagaacaaactcaactacgttcttatcggagatccggctttaaaacttgcttaccccgaacattccatacaagttacccgcataaacggaaatagcggcgaaaaaaatatcgaaatgattccgggcaaaaattatacggtggagggtgaaatacgatctcaccaaaacgagctactttccgatttcaacggttatatatactataacctatatgacaaagaaaaacagttcaccacattggcacatcaagacaaaaaaacatggacttatacgcatcgccccgatttattgactaccggtaaaggcacgatacaaaacgggacattccgaatcaccgtcacactcccgattgacaattcacattccggaaaatccgggctgctaaatttgtacgcctatgacgaatcgggcagagaagccaacggatataccgataaattaatcgtcagcacggctgtcgaaccgataacagaagatatacaaggccccgacatcaagttcgccggaattaacgacgattccttcaccgaaggaatattagtaaacaatccggccacgttcgtttgtaaattctcggacccttccggtatatggaacggaaacagcttaggcaaacaaatgaccttatcgctcgatggcgcatgtatcgaagaaaacgtcgctcgctattacaagcctatcgcagaaagcaagattcccgaaggagaattcatataccccctccctcgactgagtaacggattgcacacacttacattcaaagtattcgacaccttaggaaattcatcggaagtaaccatagctttcgaagtcaaagagaacagcgaaacatatactatctcccttgaagaagaaccggcgaccgaaagagcgacaatctcgtgtcaggaccaaaacgggaacgacgtcacagaatcgaaacatacccgaatctctgttactaacaccttaggcgaagaaatctggtcgtatgaaacgaccgagaataacccgttccccttgacctggaatctccaagacaacaacggaaaaagagtatccgccggtcaatactattgcaagggttatttcgaaacatctgccgggacaatcgttacacccgctaaaaaaatcgtggttatcacgcaataatccccacgattctctgtttattatatacatgtaattcgtaatgtcagcaaagatgaaaagactgtctttttatattataacaattattcttgtatcgctattcttgccggtatatgcccttgcagccaacggaaattcgaccaagaatgaattcaaccctatcaatacaggagtcacttcgctaagcataactcccgattctcgtggagcatcgatgggtgacttaggtgtcgccaccgaccccgatgcaaactctcaattctggaacccttccaaatatgctttcgcttacagccaagcaggtgtatctctatcgtacacaccgtggttacgcaaactggtaaacgacatctatttggcctatttagcggggtattggaaattgggaagcagcgatttacaggcattaagtgcctctttacgctatttttcattgggagaaatcgtactcaccgataatcaaggaaacgcacaaaatagcataaccccttatgaaatggctttcgatgtaggatattcccgcaaattgtccgataaattttctatgggtgtcgtattccgttacatttattccgacttagggtttcattatgacgaatcgagtgtttccgatgcatcgggtgcatcggccttcgctgccgatatatcgggatactacacgacttatcccatcataggtcgtaacgaatgccaatggtctttgggtttcaatatctccaacatcggaaccaaagtatcttatgacggaggtaatgaaaacgcattcctacctactaatttgaaaataggtacatcgtttctttttccattagccgaatataacacactatcgttgaacctcgatctcaacaaattattagttccttctaccccccaagtttccaattacgaaacagaagaagagtatgaagaagccaaagagaaatggcaaaatacctcacctatatccggtatattcaaatcgtttaccgatgctccgggaggattcaaagaggagcttcgagaaataaacttctcgataggagccgaatattcttacaatcaacaattcttcctgagagccggatactttaacgaaaacaaatacaaaggaaaccgcaaatatttttctttcggagccggattttccttgaacgtattgaaaatagatgcggcatatatggtggcaacagcacaaacaagtcctttggatcaaacacttcgtttcaccctctcgttcgacatggacgggcttaaagaccttctgggaagacgatgaaaacacgtataggtttcggattcgatgtccacaaattggtcgaaggacgggaattatggttaggaggaatacgtatcgagcacaccctcggactcctgggacactccgatgcagatgttcttatccatgccttatgcgatgccctgctcggagcggcgaacatgcgtgacataggatttcacttccccgatacggccaacgaatataaaaacatagacagcaagattttactaaaaaagaccgtggagctcattcgagaaaaaggattttcgataggaaatgccgacataacggtctgtgccgaacgccctaaactcaacccacatattcctctcatgcaaaaaacactttcagaatgtatgggcatcgatcttgaagatatatccattaaagccactactaccgaaaaattaggctttacaggaagagaggaaggaatttctgcttatgccgtagtacttttggaaaaataacgaagagaaagccgtaaaatcaacagctttctcttctcttttctgcgatttttttttaaccaaacaattctcagaaaaaagggctatgacccaataagtagcccacaagttcaattcatggtcttttcgcagaaaataaacaggaaaatcccctctttcgtaatctcgtctaaacgaaatagactcacgaaactttaaaataaaaaagcgtgagcctgatagtttatcctattcgaggttcagcaaaacctttggtggataaacaaccagcccacgcttgtccatataacaagcgtaggcgcttagttgtctattaccccaccataaaaagaattttgctgattccgaatagaggtaatattctaaacgcttatattcccaatattttttcaaagatactctttttcccatgagacgtccaaaaactccccgttttttaacattctcaacagatacgtttttatgaacagattgtacctggcttcgtaaaagttcgctatttttgcaatagatgcgaaacaggatacaactcgacataaaaatgagcgaatacattttattcggttttcacctttccgcatttttgcagcaacacgaaacgctatggattctgacaaacgagtattgataggtatgagcggaggtatagacagctctgccgcatgcatgatattacaagaacaagggtacgaagtaatcggtctcaccatgcgcatgtgggatttaccccgacatttcccgaacgaaggacaaacgattcctcaatttgccatagaggccaaagaactggcagagaagataggaatagaacaccacattctcgatgtaagagacgatttcaagagaacggtcataaaaagttttaccgacgaatatttaaaagggaatactcccaacccatgtgttctttgcaataaacaattcaaatggcattacctcttgcaggaagcagaccggttgaattgccaatgggtcgccaccggacattatgctcggatttcacggaaaaataatcgcttcatactaaacaggggcgccgatcctaaaaaagatcaatcttactttttgtggagactcggacagcaggaacttgccagaaccattttcccgttaggcgacatcaccaaagaggaaataaaacaatacgtcgagaaaaaaggattccacgaaaaagtcgaaaaaaaagagagtatggaagtttgtttcataccgggagactatcgggactttttacgtgaacaacttcccgacttagaccgggaagtgacaggaggatattttatcgatgccgccggacggaagctcggacagcacaaaggattcccattctataccatagggcagcgcaaaggattggagatagctttggggaagcccatgttcgtcacccgcataaatccgataaaaaacacgatacggttgggagaacggtcggaactgctcacccggaatatggttattaccgatgttatcgaaaccatacccggcattctgaatacatcggaaccggtcgacgttcaaattcgttaccgcagtgcggctataccagcgacccttcgcaaaggagaaactcctaacgaatggatagtctgctttcaatccgatgcttcggcggtaactccggggcaatcggcagtcatttaccagaacgactgtattatcggcggtggaatcattgccgatcaacggttattaaaaaagtatgctctatgatacgcccgatactgctattatcctttttcatcgctttcacagccaataatatagcacaagagcaacaataccggatatggttcaacgacaagcccaaatcggttcactcggtcgatgaacccgagaaattcttatcggaacaggctatcgcccatcgggaaaaacagaatattcccatagactccaccgatttacccatagaccccgtccgattaaaaaaactttcggaactcggagcccgtatattggccacatcgaaatggctgaacaccgccaccatagtattgaccgatacagctgacttatcggcaatcgcctctctgtcgttcgtcaaaaagcacaaaagtttaggagtagccgtacaaccagtctctaacctcaaaaaaagacagaaacaaatcgaatcggaatccgagaatccctacggagatgccaccctgcaaatagaggtacacaacggggacgaattacatcgagcaggattcaccggaaaaggaatgacaatcgccgtcatcgatggaggattcctcaacgcagaccgcaaccccaagttcgaccaaaataaaattgtcgggaaccatgacttcatagacaagaaaatggatttcatgcacggagatacacacggttcgtccgttctatcgaccatgttggtcaaagacagttccgtctttatcggtacagcccccgatgccgcatactggctcttgcgctcggaagataccaatacggaatatccggcagaagaagattattgggtggcggctctcgaatatgccgacagcataggagccgatgtgataacctcttctctcggttactccgaattcgacgattcccggttcaatcacacatgggatcaacttgacggcaaatcggcttttatttcccaagcagccgctatgggagtacaaaaaggattgctcatcgtggtaagtgcagggaacgaaggaggtaacaactggggaaagataactgttccgggcgatgtcgatggcgttctcacggtaggagcagtttcacccaacctgaaacctgcatatttctccggcaggggatttacggccgacggccgcattaagcccgatatcatgggaatcggggctaccgccgcaacaataacacccgaaggaaacacggcatggaaagacgggacctcattttccgcgccgataatagcaggacttacagcctgtctgcgacaagctcttcccgacctttctgcacaggaaatcgtcggactcatcaaaaataacagttcgcaatctttaacgcccgattccgtcatgggatacggcatacccgatttctatgcagcctatcgtcaaggaacgggaatcgaaccctccctaaaaggggatattcctctacaaatcatttacagggaagaaatccccgtcataaaaataaaaaggctaccgatcggcgagacctcgattaccctccacatatacaccttggaaggcgttattatacaagagtataatgtttcggaaaattccgaaacgcccttgtacacattgaaaaaagggatatatatactggcagcccgctgtcaatcaaattattggactcaaaaaatacaacggttatgacctccgggagaaaagaattttcactactcgaactaaatgcttgcgtgcgcaataccctacaagagtctttgccggaacggtattgggtacgcgccgaaatcagcgaggcgagaatacacccttccggtcactgttatttggaactgatcgagaaagaagaacaatccgggaaaaccgtagccaaagccagagccaccatttgggcgacgacattccgattattgcaaccgtggttcgagcagtcgaccggacaactgttcacatcgggtatcaaaattctcatacaagtcagtatctcctttcacgagctatacggttataacctgaccgtgcacgatatcgatcccgcttatacgttgggagatgcgactcgtcgtcgagccgccatactgcaacaactccgagaagaaggagtagccgacatgaacaaagagctcacatggccgatactgccgcaacgtatagcggtcatatcttctccgtcggccgccggctatggcgactttatgaatcaaatacaaaacaattcttacggatacaaaatatataccgctctcttcccggcggccatgcaaggcgaccaaacagaacaatctatcattcatgctctcgaccgaatcaaccggcacgaagagttgttcgatggtgtcgtcatcattcggggaggaggagcgacgtccgacttgaatagtttcgacagttatcctctggccgtcaatgtagctcaattcccactacctgtcattaccggtatcgggcacgaacgagacgacaccgtcatcgacatggtagccaacacacgggtaaaaacccctacggcggcagccgaatggattatcgctcgtatgcacgaagccgacacatatgccgtcaatctgtctcacacgatcagctcagaagtccgtagtcgaatcgaccgggaaaagcagacgatacaacgcgcaacctccgcacttccactgttcatcgaacggctgatactcggagaaaaacataaaaccgggttgttaacccaacaaatcaaactcgctttacgagccgttatcgatgcggaaaagaacaagctcgaccatacggaaaagactgtccggctattgtctccccagtcactactcgaacgaggatatagcctgaccctccacgacaaccgggtcgttaaaagtgtcgcagagctatctcccggagacacgatagagactatctttgccgatggcaaaacgacaagccggatagaaaaaacagaaccttcgaaaacaaaataaaaaatatatatggctaaaaaaacgactctctcctactcggatgcaatagccgaattggaaacgattgtaaacaaattacaaaacaacgaatacgaaatagacgagctgcaaaaatgcacgacacgttcgctcgaattattgaaattctgcaaatccaaattattcgagaccgacgaagctctccaaaaaatattggccgagttgaacgattaaacagaatatataaatggctcttaacacccacaatataatatatgccggtttatatatccaaaaacaaaaaaaatgtttaattttgccgagttttcaactatatgaatatgtccgaaagaaaagtccgagtgcgtttcgcaccaagccccacgggagcattacatattggcggggttcgtaccgctctctataactatttgtttgccaagcaaaatcacggagatatgatcttccgtatcgaagacaccgactctcaacgtttcgtgccgggagccgaagcatacattatcgaagccctcgaatggttgggaatcaagttcgacgaaggggtaagctacggcggaaattatggaccttaccggcaatcggaacgaaaagacatttatcgtaaatatgtaaatcaactgctcgatgcaggaaaagcctacatcgcattcgatactcccgccgaattggaagccaagcgaaacgaaatcgccaacttccaatacgacgcctccactcgcatgcaaatgcgaaactcgctgacaatggacaaagaggaagtagattccctcatcgcacaaggacaacaatatgtcgtaagattcaaaatagagccgggcgaagacatcgtagtcgacgaccttatcagaggagaagtgaccatcaactcgtccattctcgacgacaaagtgctatacaaatcggcagacaatctgcccacctatcacttggcgaatatcgtcgacgaccatctaatgcttgtctcccacgtaatccgtggagaagagtggttgccctcggctccgttgcacgtattgctctaccgggctttcggttgggaagacaccatgccgcggttcgcccatttgcccctgttattgaaacccgacggtaaaggcaagttaagcaaacgagacggcgaccggttgggatttcccgtattcccgctcgaatggcacgaccccaaaacaggcgaagtatcctcaggatatcgcgagtcgggctacctgcccgaagccgtggttaatttcctcgccctgttaggttggaatcccggtaacgatcaggaaatcatgtcgatggacgaacttatcgaactcttctctctcgaaaaatgtagcaaaagcggggctaagttcgattatgaaaaagggaaatggtttaaccacaaatacatacaagagaaaagcaacgaagagctcaccgagttattcatgcctattctcgaagaaaaaggcataaaagccgataaatccaccgtcgcccgtatcataggccttgtaaagggtcgcgtaagtttcataaaagaattgtgggatcaagcagctttcttttttgtcgcaccgactacctacgaagagaaatcggtaaaaaaacgctggaaagaagagacccccgctcaaatgcgcgaactcatcgaaatattgcgcaatatggacgacttctcgtctgccccggccgaaaaagtcgtattaggttggatcgaacagaacggttaccatttgggtaacgtcatgaatgctttccgtttggccgtagttggggaatgtaaagggcctcacatgttcgacattacggaaatcatgggcaaagaagagactatcaagcgtatcgagcgggctatcgaatatttaggttaatgaaatacagacagccacatacactgcttttgattactctccttgctgcgctgtttcctgcaaaggctcagcaaatagcttggagcgtagatatgaccggatttttcgacaatcgggaattcggttattccaaagcacagtcccaaacttttttcgggacacgcttgtctcccgaaatcggtatcagaataggacatagcacgatcatggcaggagcctcatgggtacaacccatcgacggatccactcgcgaggccaaagtgcaccccacggtctattaccgttacgacacctccaaattccgaatgtcgttgggtatgtttccccgtacccaattaatcgaaaacgtaccggcaatcttgcaatacgattctctcacctacttccgtcccaacatagctggcgcattattccagtatatacataccaaaggattcgccgagctctatatcgattggagacaagtacagaccgaggtaaaacgagaggctttcatggctgtattcaacggccggtggcaacccctgccctaccttttcgcgggagggcatttggtgatgaaccacttggctcgtcctcgcaattcggatagccgctatacggttaccgacaatctcatcgccagcccatacatcggactggatttaaccacatacacaccgttggacaccttgaccctcaaagtggggtatcacatcagtctcgaccggcttcgcaacgtcgggacgtggcatcacccgcaaggcattctcatagacttattggccgaatggcgcttcttgggtctacataacacattttacaaaggaggttcgcaaatgcccctttatccccaattaggagctcagctcaatcaaggagatccgttctaccagtcttcgacctataatcgcacggatatatacgcctacattttccgcaaaagttatcttaattgcatagcttcctgcaacctgcattatacgcccggcaacctcgattttcaacagcaactcaccctacgattctatatagacgaccaagcatggaaaaaccgtaagggaaaacagaatcgaggttacctgaaaaatatcttgtaacccgacaagagaaaatcgccgctatgaaatcgatttataattttggaatatattgctataaacaattagtcgcactcgccggaatacgaaatgtcaaggcccggaaactgactcagggacaaaaaggaatcttcgattacctctcccggcatgccgatccgcaaggagggtatttgtggatacatgcctcgtccctcggagagttcgaacaaggacgtccgcttatcgaagccataaaaaaagcgcaacccgataccaaaatattactcacgtttttctctccatcgggttacgaagtccgcaaagattattcgggagcggatcttatttgctaccttccgttcgacctgccgggcaatgtaagacgattcctcgacttgaccaaacccacgaaagccatattcattaaatatgaattttgggcgaactacctcaacgaacttaaacgcaggaatatacccacgtatattgtctcggctattttccaccccaaacaaatattcttccgttcttatggaggatattttcgtcgcattttgaaaaactttacccacctttatatacaggacgaacgctcccgacaactactcgccagtataggcatcgacaatgtatcgatcgtaggtgacactcgtttcgaccgggtcggcgacattcgtcgcacggccaaagaattacctcttgtcgaagccttcgcacaaggaaaaaagatacttattgccggcagctcgtggcccaaagacgaggagttcattactcgatatttcaatcacaacgacaatatcaaactcattctggccccacacgaaatacacgaatctcatttgcaatcgatagagagattactgaaacgcccggctatacgttacacacaagccacaatcgacaccgtacagtcgtatgattgcctcatcatagactgcttcgggcttctctcctccatttacagatacggaaccgtcgcttacgtcggtggaggattcggagccggcatacacaatattgccgaagccgccgtatatgacatacctgttattttcggacctaaccatcgccgattcaaagaagcccacgaactcatagcatgcggaggcggctttgcaatccacaacagtcaagaatttgcaaccgttgccgacaaactactaaccaatcccaaatacttagcctctgccagaaaaaatgcaggtgattacatttcgactcatgccggagcaaccaaactcattttgaaagagttgttcgggatagaagaataacggtacacctgttctttattgtttccgcctttactcaatctcggctggattaaattcgatttaaaatggaaaaggagataaagaaacccgttaaaatacttttcgtctgcctcggaaatatttgccgttcgccggctgcggaaggagtatttaaacatatgcttcggcaacgggggataaccggtcgcttcgaggtagactctgccgggacttacggcggtcacgccggggaattacccgaccctcgcatgcgttcacacgctgcccgacgcggatatttgctggaacatcgcagtcgccctgtaagacccgatgatttcgagaaattcgatttgattttgggtatggacgattacaacatcgatacgctccgttctatggccgactctcccgaagaagccgcaaaagtaaagcgtgtaaccgattattgccgacattacccggtagattgtatccccgacccttattacggtggagccgacggctttgagaatgtattgaatatcttggaagatgcctgtgaaggaataatcgcggatttttacatcgcatgaatataatgcacttcacaccgcacaagacataaaattaccgactttccatctttcccttgacaaagggaacatttctacacctctcccctgccgtgttccacgtggcattgccaacacccttcttagaactgcgagagagtggtgcggcattattggtatggtatttaaacctccttccctaccgtgtctcatagcattaacggggtgtcgcaaagcgatatagaggtcttctgttagccgtataggggaataaatacgaggaaagtatttctccctcctccctgccgtgtcccgtagtattacggggtgttttgcaacgcaaaatataggggaggtggctcgcagagccggaggggttgaaaagagatggtgaacaactggcttataagctcagagacgaaagataaataaacaatagatatgacattttcattaaaaatataaagtttccttcaaaaaagctttttctttccgattcgtttttatatttttgttagactaatttcaatgggctcaaaataaaccatatagaatattctaactctaaaacaatacatctatgaaaaaaaattacttcttacacacagctatcttattagtagcgttggtttgtggtactgtcccggtgtggagccagacttacaaaaaaatatcttctatcgaagaacttaccgatggaaaatatgtaatagccaatgaaaaaggcgaatatgccatgaacagcacaaacgatgggaaattctatacgcacacgagtatatcccctatcgataacgaaattatcaacccagatgcatccatcatttgggaaataaaaactaacaacggtagtaaaacaattaataatgggacttcttatgtttattgtgccggagaaaaaaatgttcctataaaaacttgggccgataacgataatggcttcttttggaattttacagttacctcgggagtttttacggtacaaagtgtaaaaactacaaccttatatttaaaatataatgcacaaagtcctcgtttcacaacgtataaatcaggacaacagaatttaactctctacaaattggaagaaacgggaaaatcaaatcccgaattaacatttagcggaatcactggcgacataaccaaaatgttggcagacggaagttacagcagcaaagccacaacgaaatcggacgctactatcgtttacagcagcagcaatcaagaagtagctaccatcgaccaacaaggtacggtaacactccttgccggtggaacaaccgtaatcaaggccgaagttgccgaaacagcaactttcgacgcctcttttgtcgaatatacgttgaaagtaacagatccagcagctctcaaaacatttgtaaaagtaactaatggttccgtaaccggagggaaatatattatcgtttaccaagcaagcgatgatgccaactcggtaatggctttgaatacaaccaatgccgggaaattctttggaaacaccgaaatagaccttaccgaaaataaaatcgtcaccgacgacaaaacagttatgtgggacattaccctagaatcggacgatcattactctatcagcaacggaaatatatttgtaggatttaagggcaacaataatgaagcctatatatacaatgactatacaatcggagaatgtggttggaattttatatacgatgagaataataaagttttcaaaatccaaaatgccggtgtaaataatcgctacttacaatataatacaggaagtcctcgattcgcttgctataccggttcccaaaaacaccttactctttataaacaagaagacagcagaacagccgtagaagtaacattcaatgaaatagacggagaccaaaccttattcttcacaaaaggattcacctacaatagtgcagctactgctactccaacaaggcctatcacttacagcagcagtaaccaagaagtagctactatcagcacagaaggtgtagtaacactcgtaggtgcaggaacaactgtaatcaaagcctccactgctgccgataacacctatcaagaaggtgctgcccaatacacactgaccgttcgtaatacatcggtagcacttccttatcaaattgatttcaagacagaaggattaggcgattggctcacctatacaaccgagggaacagtagaatgggaatcgaccaattatggggttcaagctaatggtttcgataaaggtgtcggtgaggcttatttaatctctcccgccgtaacagcctcagatatagttttagcgttcagcagtcaaaagtcatttaacggtaacgatttacaactgttctactcaaccgatttcgaccccagcagcatgtcgcaaccgagcgatgcctcatggaccgaaatcaccgatatggcaacatgggctaccagccaagaaacgaccgaatcgggtaacatcgagttgcacgatctcaccactcccattcgtttcgctttcaaatacacttgtgaagccaatgaagctgcccgttggacaatcgtcgagctgtcaatctcaaaaggtcaacctagcggtatcgaagatgtagccaccaatgaaatgaaagtcatcaacggcaaaggtcaagtaaccatcgaaactgccgaagctatgcctatcgctatctatgcactcaccggagcacaagttcgacaaatagaacttgtcgagggaaccaacattatagaattaccgaccggtatttatctgatcggaaataaaaaagtagtcgtattttaaccgatactactttcaaccataaaaaaggagcggcatgtaatgccgctccttttttctattcctcacgcgccagacatctgttcggtagaaaatccgcagataaaggattgaattttagcaatgaaattcttgtcgacaacctcattccgatcaattcggtgagagacagagaactatcgtttgattgaagattcaaccccctcgccctacgggcactccccctatctcatctgcgatgagcagagggagaggactgaaatgtcacttcatcagttttaaactcctccattgccggcattttctaacccctccgtccttcggacacctcccctatattttgttgtgcaaaacaccccgtaatactacgggacacagcagggaggagggaggtaaatactttcctcgtatttatttttctaacagaagacctctatatcgctttgcgacaccccgtaatgctatgggacacggcaggggaggaggttttaaaatgccactccaacaatgagccataaatccctaccaattatcgaatggcccaaacatcggcttattcctacgagccagaagaaataaataatcaataaaataatcgactccaactcccaataaaaacagaaagaaaaaccattcgcccttctttttgtattttttttactcaaaagaaatacctttaaccccctatgtttgtttaactttaaatgataaactatggtaattgcgtatttaagagtcagcaccagtaaacaacatcttgtcaaccaacaagacgaaatcaggcgtttcgcccacaccaaagagatagaagtcagccgatgggtaaccgaaattgtcagcggaaaaaagaatcagaaagaacggaagttagggagagtaatcaatcaattaaaaccgggagacacgctcatcgttaccgaaatatcgagattaagccgcactctcacagagattatgaccattatgggaaaatgtcttgaaaaaaatattacaatctactctaccaaagacggatacgcattcgataataccataaacagcaaagtcctttgctttgcattcggccttgtcgcagaaatcgaacggaaccttatatctatgagaaccaaagaagctcttgccttacgaaaagcagaaggagtcattctcggtcggaaaaagggaagtatcaccaaattgaaaatactcgtcgataacgaacttgaaataatagatcgcctgaaaaaaggagaatctatggcttcgatttgccgtatatacggagtctctaccgatacgttctccaaattcagaaaggtttgtccaagcgtagaagaagcattccaatacaagatgacgcatttttatgcttcgtcaaaataaaaatcaccccggagaagaagcaccggggtgaaaataaagaaacctattttttcagaagttccagcagaagttccggctcattcgtcgtgataaagtcggctgcttcatcgataaaatactgcaagtcgtctgctttatttacggtccagacattaaccgtcaagcccaaatcatgagcttcccgaatccaactcttattgtttttcaataccttttgatgataatcgagacccgtataccccaactctttaagctcggcaggtgttttatctccattcaaataagcgaccttcgcattcgggtccaaccggataatctccgttcccaccaagttgctgaatgcgatgtattctacctgcccttccattttcatcgatttgaccatatccacaacctttttagccaactcgatatttctttcgggagtagattgggttttaagttccaacaccaatatcatgggcttcaacttctttccggcttttaaataatccttcaaagaaggaacagtctccccgtttttcaattttgacttcgttatggtcttgaaatccgtttcttcgattttcaatccgtccaatgttttggggtcatggtttaccaccaacccaccgtccgaagtcaaccatatatccaattccgacccccaacaaccgacgtcatgagcttttcgcaatgaagccaaagagttctcggcagagccttcacatttccaatatccccgatgagccacggtcttggtcgacgactttgcctgaatagccggagtcatagccaataacatcaatgcaaccattaaaattttagttttcataatcatttgttttttattaaggtatctacttacttcttcggattctccaaattagttcttatcttgaagtcggcggttttaaaagagacgttcttatctcgaacatcgttacaatgaacgatcaaagctccctctttttcccaatacgatttcacggtatgtccgctcatcgggccgtcttctttgcctctcaccgtcacatcgtcggggttcaccacaattttcaatcctctcgattcattcaacatatccatgtctcctcggctattcccgcccacaatcaaaggcacggctttaatataagtaggtataacctgagccttgccatcatcttgcggtatgggcataatgatttcatcggacatgactccgtttttcacgacacccttaacccccagcacatgagtgacgggtattcccaactcggaagcgacaaacctttggtataaaaattcgggagaggcagtcaatatccacacctcgaaaccatattctttcaagttggaaataagagtcttcatctcaggatacattttccccttatacgaacgcatataacaatcgtaaccgagggtagcgatttcctcaggagtcatgccagacaaaaaatgtaccctatcttccacataaggtttccccacgttattaccgtcttttaccatacggtcgagaatcgccatcttttgtctcgattctttatctttacggttcttgtattttttatcggcataatcatacaacgcctcgtcggccagatagtaaggagcttgtccgaacaccgtaccgtcgcaatcgaacacggcgaccttacggccggtaacggtcaacgtcgtattcagaaattcctcgatacgagcattcgtctcatcgggccaagtcgcaataggacgatattgttgggcacagatactccctgccgcaaaaacatttaacagaactacaatcgcataaaaaaatctgttggaaatagatcgcataatatattttttttaatttgcactttatgcaaatatacaacaattatctacatataatattatacgaatcgaaaaaattcgaaagtaaaacccccttacttgaaataaaatcgaaaggaaacgaaaatttcatagaatcgtaataaagcgattgttcattacattccgtactcataaaagagtacatcgcagttacccgactttgctccgcattctatcgcttaatatcgctgccatattctccccagcccatgcaatcagactatcaatacaaggcaacaaagatttcgcccggtcggtcaaagagtattctaccctcgggggaacctcggcataaatcactctttttaccaatccgtcttcttcgagggctcgcaaggtaaccgtcaacatcttttgggaaatatcggggatattcttctgcaaaacattaaaacgcataacagacgaaccactcaatgtataaagaaccaacagggaccatttatcaccgatacgcgaaagaatattccgaataggacaatcggggaaaagtgcatccttaatttctattttagccataatcattatatttcaataacaatacaaaagtaattaagaaacttagataatgcaacagtaaaattcagttatattaaaagaagttaaaacacactttaataactcattcgtattcaacgaaggtttcaaaaaagtaactatctgacttcgaggtatcttcttgtgaagaaaaaattatagtttcatatttgcagctaaaaagagagtaacaataatttagtaactaataaaaactagaattatgaaaaagaacattttaattttattatcattaatcacatttacagcaatggcacaaacaaaaggaaaattcgaagttctggacttgaaggatttcaaattgcacgtgtattacacgaacgatgctctgaacgatgcaagctacatcgtagaaggtaaaaacggactcattaccttggaacagcctttatttaaagataatgtggcagaattcgacgcttatgtggcctcgttgaacaaacctgtacagacaatcatcaccgattaccatgtgggtgggacgggaaaccacgatatagtaatggccgaaggtatgccagcctttacaaaaggagcgacctacgacggaatgatgcggaacttcgccgaaattttcggcgatgcaatcgtaccgctaccgaccgggaaagcagaagaaattaaatttggcagcaaacaaacgtgggataatatagagttttacttcgacaaaggagcttccaccgactttcccgcagccagtatcattatcgggaataaagtttactacacccactggactccggtaaaagctcacataagctacttgcaaataagttctccggccgccatagatgcagaaattgccgaagccgagaaagcgctgaaatcgggatgcgaatactttatcggaggtcacgacggagctaccggacgcgaatcggttgaatttaaaatcgactatctgaaaaaaatgaaacaaatcctccgggaaaactccaccgccgagaggttcatctcggccatgactcagacattcccctctctgccaggagaaaacaatctgaccgacttggcgaaagccctctacaagcactaactttcctatcgaacaaaaaaatccgatagcttcaactgctatcggatttttctgcatcctctccgcttttatagctctcaactcatcgcctgattacgaaactcgttcggagtacacccttcgagttttttgaacaaacgactgaaatgttggggatattgaaatcccaaagaataagcgatctgactgattccgagctgtgagcccaatatatactccttagacaattcaataattttaccttgtatatattcctgcgctgtcttcccggtctcttttttcaccaagtcgccgaaataacccggagaaagaaaaactttgtcggcaaaatacctgacggaaggtagtccccgcacttgtgattccccgttgcggaaatagtcgtttaaaagctgttcgaacctgataaggacatcgttattaaccttttcacgagtatagaattgacggtcgtaaaaccgcaaacaataatcgagcaacagttctatattgaccgataacaactcccttgtgtgtttgtccaccgggtgttccaactccacttctattttatggaaacaatccataataatttcccgctcttgatccgaaagatggagtgcttcgttctgttcatacgaaaagaaagagtacttccctatcttcttccctaatgccgttccataaataagatcggggtgaaaaatcaatccatacacctcggggcttatctcgtcctcatcggaatctacgccaaccaactgccccggagcgaaactgacgatcgtaccctcctgataatcataataccgtcggccatatttcaacgtacaattcgttccgtttttcaagaacaaggcatatacgccataattcatcttcacgtgattgacaactcgggtcgctttcctcaaatccacgaccgagaccagaggatgcaaggttttcaagccatacatcttattataaacatcgacactgttcaactgaataatttcgttcatatctttttagaaaactaattgcaaaagctgtacggccaaaccgtacattcttatacagtgcaaaattacaacaacttacgaaaagagaaagagacgcatcacagaatccggaattcgggttattctttccgtaattcatctactatcgttatagaatataggcggtaattttacatcgtcaaaccaaccatgcaaaaagaatataatatggatttaaaacgattccaacaaatgattgccgcaggcgagccgttggcgggtgaagaaatgattgctttcatgcgtgaacaaagcgacgacactcgccggctactattcgatttgaacggttcttaccacacacccgaagagatcgtcaccctattcagccaaattaccaacagcaaggtagacaattctttccgtctgttcccacctttttataccgacttcggaaaaaatatccatgtagggaagaatgtctttatcaactcttgttgccaatttcaagaccaaggcggtatctttatcggcgacggagcactgatagggcatagtgtggtgatggcgactttgaatcacggcttcgctcccaatgaccgccagaatctctatcatgcacctattcatataggaaaaagtgcatggatcggtgcacatgccaccatcttacccaatgtgactattggtgacaatgccatcgtcggagcaggctcggtcgttaccaaagatgtaccggacaatgcaattgttgccggaaatccggctcgattcatcagaaaaataaactcttaaaccgaatgaagccttttatcattgctttaaccctttgccttttcgtaaacatttcctcatgctcgaccaacgatgccccgattgtggaaccaccgaacggagagacagcaggagacagtaatacgcccacgatgaacgaacaaatacgtatcattatcggcaacgcctcttttacggccactttggaggataacgccacagcgaaagcgttcgttgcccataactgtaaacatgaccgaacatgccggtaatgaaaagttttattacttgccgacagccttgcctacgagtactgttacgcccggaacaatcttcgctggcgacctgatgctatggggcaacagttgtctcgtcttgttctatgagaccttttccagtccgtacagctatacgcgaatcgggaaaatcgacaagccatcgggattatcggcagcagtcggcgacaggaacataaccgtgacattcgaataacctcaaccatataaacatcaatcttatgaaacaacgaatcaaatttatctttacaacatggttcatcgccataagtctgtttacaataaatgcacaagatgtacaaaccaataaaaacgatatggaaaatttgaatctgacaaatgaatgggataaaacattcccccaaagtgacaaagtgaaacatagtaaagtaacattcaggaaccgttacggaattacgctcgcagccgatttatacatgccgaaaaatgccgaaggcaaattaccggctatcgccgtctgcggcccgttcggggctgtaaaagaacaagcgtcgggactctatgcgcaaactatggccgaacgaggctttctgacaatcgccttcgacccctctttcaccggcgaaagcggcggcgcacctcgctacgtggcatcacccgacataaatacggaagatttctgtgcagccgtcgatttcctctccttgcgtgacgatgtagattcagagcgaatcggaattatcggcatctgtggttggggcggactggctataaacgccgcagccatagacacacgcattaaagcgaccgtagcctctaccatgtacgatatgagcagatgcacggccaacggttatttcgacgaaaacgacaatgccgatgcccgttatgaaatgcgccgacaactcagctcccaacgtaccatcgatgcaaaaaacggttcgtatgccacggccggcggtgtagtcgatccactaccgcaggatgcaccgcaattcgtaaaagattatcatgcctactacaaaacttcacggggttaccattctcgttcgttgaactctaacaacggctggaacaaaacttcggctctctcgtttctcaatgctcctatcctcgcttatagcgacgaaattcgtagtgccgtgttgctgattcacggagagaaagctcattcgcgttatttcagcgaagatgctttcaaaaagttgaaaggcgacaacaaagagttaataattgtctcaggagccaaccacacggatttatacgaccgaacagacattattccttttgataaattggaatcttttttcaaagggtatttgaaataaaatagagcctgacgaataaataaagcccgataaacctatgttatcgggctttattctttattccaacgaagcatcatctccggcagggcaatcgtaccatcgccccgcaaccggaaaaaccaaatattacttaccaaaatttattctgctgaggattgtattcaaaaccgacgcttcccaacttagcgactaaatcagctttactgatgtgcatatcatcgcacaattcatctaacgacacataattatcccgtaacttcgtattaataaacgagaataaaatcatcgggtcttctggcaaaacagtcatatacttttctccttttatttcgggtagcaaagatagtgtaaattaaacgattctttcaaaaaaaaattacagatacccaattgctaagtatctgtaatctttctcggtgatccgcttggggctcgaacccaagaccccaacattaaaagtgttgtgctctaccagctgagctagcgaatnnnnnnnnnngtagaactattttttctttttgcaaaattatatatctataaaaatatgttaaataatatctttcattcttgtacctcttccgaaacagaggtgtcagtaggagaatctggtggctcgacagaatcggctcctatcacataacgctgataataagacagacacaacgtcgttaacggaagagcaataatcataccgacaaaaccgagcaatgtgccccaaatagaaagcgagagcaagataatagcgggattcaatcctgtgaccttacccataacccgaggaacgataaacacatcctcgataatctggactatgataaagaccaatatgcaagcaccgaacaacaaccagaaattagttccggtatcggatgccgaaacaagacataacaggatagtcggaataataccgataagctgcaaataggggaccatattcaataccccgatgaacagccccaatacgatagccaacggcaaccctacaatcaagaaacctatactgaataagatacctaccaaaccggcgaccaatgcctgtccccggaaatagcggttcatactctcctctatatcattccctatcgagacgagcataggccggtatttttgcggtatcatacgctggaacccacacaatatcctgtcataatcgagcaatataaaaactatatacaacagcacgaccaaccaactcacaatattgatgatttcgcccaccgaaccggtgatgaagccccaagccccggaaaaactctcctcgataatcgagagccattgttcccgactcaataatcccgacagctcggaaaaattaatattatcacgaataaaatcatgtacggcttgcgggacgaaaggtatactcgaagaattgtaaacatactcgctcaacagctccctcatatgagcaatctcatcgataatcgacggcagaaacaacacacacaacaaagatatggttatcaacacttccagaaaagccagagtgatggctactaccctgcctttcaatttaaacacccgcttgttatacacgaccaacggattgagcatataggcaactatccatgctacaaggaaagggagcaaggctcctcgaagtatgtaaaccaaatagaacaatcccacgacggagactacaccgaatagaatacggataacacggtcgaacgtgtatggttgtcggtctaccatgactataacgattttaattataccctacataacaaatattcgcagttcgagtttaatccgaatgctctttatcctctcgggcttgcatctcctgcaaatagcatcggcggcacaaaggctgatattcgtttttctctcccaaaagcacccgtttatcgttatcgactaaacgataggaataatttgccaaatgcccgcatttcacacaaatggcatggactttatatacatcatcggctatcgacaataacgaaggcataggcccgaaaggaactcgacggaaatccatatccaacccggcgacaatcaccctcgtcccgttattggccaattcggaacaaacctcgacaataccttcatcgaaaaattgcgcctcatcgattcctacgacatcgacccccgatgccatcaacaatatactgtgagaattatcgaccggagtggaaaggatagaagtactgtcatgcgaaacgatattctcctcggaataacgcacgtcgatggccggcttgaatatctctactctctgacgggctatcttcgctcttttcaaacggcgtatcagctcctccgttttacctgaaaacatagacccgcagatcacttctatactccctctacggtttgtctcataattactttcggtcaaaaccataattacattatacctattttaatattttcaacaaaagtaaaaagatagttcgattttggcaacctttcccaaactatttctcccaagtgaaaaatagaatcgccatgtaaacagcatcgctttttccttcggcttatcttttcttcgataaatacaagacaaaatacagctcgataaaaaagagaaaaacacccgtttttcacatctctacattcacctttcattatctttgtaactacgaagatagaatacggttcagcatagtcaaatcgggaatacgatttccatttgtctctgtactcacctctcgctatctttgcaacgaatgcaacagacaaaaacaatggcaaaacgaatcttattatttcttctcatattcagcgcattaccggtcatagccaccacgcagcagattatcgacaaattcgtatccgacccggcttttattccgtcgtcgatagggatttgcattaccgatgtcaaaacgggagaaactatcgcctcttacaacgaacgacaagccgtcattccggcatcgacgatcaaagttattacgaccgctacggctctgcgattgtatcgcccctcattctgtctatacacgacagtgggacacaccggaacaatcgacgaaacaggaactctacacggagaccttgtgatacacggcggcggagacccgtccttaggctcggcataccgtagtcgccacaccgaagatttcatcgaccaaatcatacaaagagctctggccaatcacatcaaatcgatcgagggtcgcatagttgtcgataactccttattcgacgagccagccatctctcccaaatggatggtagaagatatagcttgggattacggcacaggctgccatgctttttcatacaaagacaaccgaatagagataaacctgcgatacaatggaaaatcgtatgacgtaaccggagtaaatccgcctaaccgttttgtcgttgagaccagtttgacaaaaggcgaaaaagaaaacatcacagtcaagtgtaaaaacaaccgatacacgatttcgggaactattcccaaaagaaaagatcgataccgtctctatttgtcgatagcccgaccggataacctattcataacagatttacaagaaaaatttcaaacagcgggaatagaggtcaaaaactccaatctcggtcaactcccggaaacgacatggtttcactatccgtccgactatctcggagatatagtacacagcctgaatgtacgcagcgacaacctgtatgccgaaagcgtactccgactcttgtctctgtcggctcatgagaaagggagcgcagaaaaaggtatcgacataatccgtaaatactggcaaaattacgaagccgactctctcgaactattcatgtacgacggttcgggattggctcgcaacaataaagtttcagccaaatatctgaattgcgtcctcaaagaaacagcccgagactcactgattggagagtatttcgtgcaaacgcttcctttggcgggaaaagaaggctctgtcgccacaattatgaagcatggagaactgcccggcgaactacgactgaaaagcggaagcatgagcgatgtacacgcctacgccggatattacacgactccccaaaaccgatatgcgatagtcgtcatgatcaacaactatacatgcacgagggctcaactgaaacaaaaaatatctacccttttgactcaggttctttctaaaaaagagtaataccgactaaaaaactttcacacgatacacgcatctatcattttatcattatttttgtgaaataactaaatgtatatgttatgcttcgagatagtcgtatcgtacacatcatagacctgttaggagagttgagggaactcttgtttgtcatcgatcaagcgggagatacggctcctgccatactgttaaaactggcaaaagaaaaagccgaagaaattacacgattgacccgtgaacttcgacagcctgaattttgggacggaatacttcgctacgatcccttcacatcggtcaagacaacgacacacgaagatgcgattccaagcatggaaaatcccctcgaaaaagtcggcgaacccgtatcttctcacatcaccgacgaaaacataatccccacagaaaagcaatccgaagaatccggtgaagagctggacactgacaataatatcgccgatacggaagattattcggaaagtccgattatagaaaataacgaacccacccacaaaaacgataccgaagaaaatgaagaagaaaacgacacgctctatccgtgggaaaaactgaatggggaagaactatcggctgtacaagacgaaaacgatgacgagtacgaagactccaacgaatttgacgaagatatggaagaagactatgaggagcccgatttatatgaggaggaaaatacggaagaaatcatcgaagaagaggaacctgcaactcccgtaactctcgaagaagcccttcaacgtcaacaagccaaagagctccgtaaggcattaagtttgaacgaccggttcagattccgtcgtgaactcttcggtaacagcgatatccgtatgaacgaaacgctatctctgatagatgccatgcagtcatacgaagaagcagaagattacattttaaatgacttgaattgggacgtagagaaccccgacgtcgccgaattcatgaaaatcgtacaaaaacattttttatagcagtatggcaaaactgtatgtagtacccaccccggtgggaaatctcgaagacatgacatttagggctatctccgttctgcgagaagtagattgtatcttggcggaagacacccgcacaagcggcatattattgaaacacttcgacatacacactcgcatgcagtcccaccataaattcaacgagcatcaaaccatcgaaggaatcgtctcccggatagaaggaggagaaaacatagctcttatttcggatgccggtactccggccatctccgaccctgggttccttttggtaagagagtgccgacgaagagatgtcaccgtcgaatgcctgcccggagcgacagcctttgtgccggcattggtagcatcggggttgccgaatgaaaaattttgtttcgaaggattccttccccaaaagaaaggccgagctacacgactgaccgaattggcggaagaaccacgcacaatcgttttttacgaatctccgtttcgtctgctcaaaacgctcattcaattcaaagaaactttcgggggagaaagagcggcatcggtaagtcgtgaaatttccaaaatacacgaagaaaccgtacggggaacaatcgacgaattgataactcatttctcggaacacgaaccgaaaggagaaatcgtcgttattatagcaggagctcccgacaaacccaaagagaaaaaaaaggaaaagtaccctaaaagcgatacctatctataaatttaattttaacgattatgaaaaaggctattacagctgctatcgcagcatcagttttaatgattggctgtacgaaccaatcgaccgaagtaaggaaacttcaagcagaaaatgactctctgctcagagtcaacgcccaaacgactgcggatttcaacgaaatgatccagctgatgaatgaagtcgaagatggatttcggcaaataaaagaggccgaaaactatttggtaacacaaaaagatgccaacggagaagtatccttgactacccgggaacaaatcaaaaacgatatgacactggtcgccgagactttgcaaaaaaacaaagaacgtttggaaaaactccaaaagcagctcaatcaaaacaaaaaccaatcggctgccctgcaaaaaacagtgactcgtctccaaaacgaaatcgaggaaaaaacacaactcataacctctttacaagaatctttggctaaacgcgacgtacgcatcgccgaattggacgaggccgtaacgaatctgaccggtcaggtagagcacctcactactgaaaacgagcagcaaaaagaagtgctcatgacccaagacgaggctcttaatacggtatattacgcattgggcacgaacaaagagttgaaagaacaaaaaattgtcgaaggcggaggtctgttctcttcgaaaaaagtaatggaaggagaatttaataaaaactacttcacggcagtcgatatgcgcaaattacacgacatacctttcgacagtaaaaaagcaaaactattgaccaatcaccccgaaggcacatacgaacttcaaaaagataacgaaggttatttgaccttagtaatcaccaacccagatagtttttggagtctgagccgctatctagttgtcgagctcaactaatcgaatacgaatcccattcccccgacgaggccggaggtgatacctccggcctcgtcggttgtccttactaaacacaccaccctatatccatggaccgctacctgcccgccctgctggctctgctattgttcacctcgtgcgacagtttttttgaaaaagaatcggttttaccgcacaaccccgagcgtcccgagttgcccccggctcgcgaccgccgctttgtcgttgacagtatccaataccacttcgactattggagccgtaaaagtacccaacaggcagacgaaatatgtctaaccatcttttcaaactccctcgattcagaatggcgcttcactcccactctggaagagccgctttacaactactcttgcttttccagcgaagaccctgtatttgcccagatttacaccgacaccctgctagtgagaactccttgttatgtcgatgacgacaaccgcatcatactgggagactcgctgtacagttttcagcagattactcaacagactctggccgaaatcgaccggacgggcgaagagaccatcattcccccacataccgaaacctacttctacggccggtacagcatcacctactacgatatagcatacaccatctggctgaccgaaatgacgagtcagacccccatcaccatcgaaggtatgtggcaaggtggtatcattaacgacgatctcacgatacgcatcgagtcgcacccgttgtaaatcgccggccgacacaacaaacacttcggtatcagtcttaaaacaaaaatccctgctccggttctttcgataaacctcggcgaagatatgtaacccaataaagggcaaacatagacatggataaaaaacattgtctataataaatttattagtaacaatgtcattagtaataatattattacttatctttacatcaaaataatatgtgaagatgatggagaataagccttttatatttggtgttgcaacatcgggcgataattttaccgaccgagagaaagaaacggaacgtttattactcaatttccggcatggtgtaaatacagtgctgatttcgcctcgccgttggggtaagacttcattggtacagaaagcgtgtggtttggctcaatccgataaattgaaagttgtgtatctcgatattttctcttgtcgtaacgacaaggatttctataccgcatttgcggctgccattctcaaacaaacatcttcgaaattagatgaatggttggaaaatgccaagctattcctttctcgtatcagtcctaaaatctcaataggtacagatccgatgacagatttttccatttcgctcgaaatgaatcccaagagccacgatgtcgatgatattttacaacttccggaaagaatagcacagaagaaaggttgtaatattgtcgtgtgtatcgacgagtttcagcagattgccgagttcaaggattctaaaacatttcagaaacggctgcgctctgtatggcaactacaaaagtcggtatcctattgtctgttcggcagtaaaaagcatttgatgaatgaactgttcgagaaaaagaacctgccgttttacaagttcggcgatgccatttatttacagaagataggtacaacagattggatagattacatacgcaggcgatttgaagttacgggcaagcagatttcaaaagagttggccgaaaagatatgtcaaagggtggataaccattcgtcttacgtacagcagttagcatggttggtatggattcatacggataaaactgctaccgagcaggattttgaggcggcatatcaggatatcatcgaccagaatactccattgttcgaaaaacagaccgaaagccttactacttatcaaatgaatttcctgcgagctgtcatagacggggttcatagtgagtttactacacaagaggttctacaaaaatatcaacttggttcatcggcaaatgtcagtataataaaacgagcattagtaaaaaaagaacttatagaaatcgagaaacgtcaagttgttattcccgacccggtgatgaaagtgtggctaaaaaaggaattgggaatataatatcacatatttataggatttcatctaaaatcctataaatatatctaatcttaaaaataaaattggaagccatttcatcatgacctccaattttattccattagaaaaagctctttttactactcttccacatgtaacgtatgccccatgcgcttctctttggtcagcagatagcgacggttgtactcgttgggtgtaacttcgataggcacgttttcgacaatttccagtccgtatgcctctaaaccgattctctttaccgggttattcgtcatcaatcgtaacttacggactcctatatcccttaaaatactcgccccgacaccataatcccgttcatcggctttaaatccaagatgcaaattggcatccactgtatcgagaccgccctcctgcaaacgataggctcggattttattcatcaaccctataccccggccttcttgattcatataaacaatgacaccttttccttcggattcgaccgcctgcatggctttatgcaactgctccccgcaatcgcaacgcatcgacccgaaaatatcacccgtcatacacgaggaatgaacccgaaccaatatcggttcatcgggttcccaagatccctttatcaaagcgatatgttccaacccattggaaagctgacggaacggaatcaaccggaaatgtccgtactccgtaggcatatccacctcgtctccacgttctaccatcgactcttgtttcaggcgataagcgatcaaatcacgtatggcgataatctttataccgaacttttcggctaccttagccaactgaggcaatcgagccattgtaccgtcctcattcaaaatttcgatcaatgcggctgcgggatataagccggccaaacgtgccaaatcgaccgcagcctccgtatgtccggctcttttcaagactcctttatcttgggcataaagaggatttatatgtccgggacgcccgaatgtctcgggcgtcgaagaaggatcggccaaagcccgtatcgtagccgccctgtcgtggctcgaaacacctgtcgtacaaccctccaatttatcgatggttactgtaaaaggtgtacccagcatagaggtattgtgattcacctgacggtataaattcaattcttcacaacgctgcatggtaatgggagcacacaaaactcctcggccgttagccaacataaaatttaccttctctggggtaatggcttctgcggcgatgataaaatcgccttcattctcacgatcctcatcatcgaccacaatcaaaaatttaccctgtctgaaatcttcgacagcatcttctatcgaacttaaaatcgtatctttactcatatctatacagttttattctcttcaattctatcgctctcctctttctccaactgtacgcacaactcttcattcgtgtgaacgatagcttccacttcattccgcaacagtcgttgctgccgtgaacctatccaatataacaacaagcctatcgggaaaagagccgccaatacataaccccatttcaccgatggagctggacgataaacccacaaattacgcaaaataggataatccatcagcttactaatcaccatctgactatggctgttcgagacataatcgaccagttcgttaatttggtttcccaatgcaattatatccgatttgttatatccgtacaaacaatatttccaataagactgacgcttccgtcccaccttatcaaggaaccgctgacaagaatcagacaaacgatgagccctttcaatggcttccatcggattcatatcctcgataatcacctctttcaaaacaaccttacgcaattcttggcgaccgatcaattttctgaaaaaattgatatacacgtcggggttaaacacggccgaatctttcaccgccttataggtcaaaaatatacccaatggtagaagcaccgcagaactgagccacataccttcccacacttcccaacgtccgtcccttgccaacttataaccgctgttatcgataatataataaaagataaacataaataccgacaccaccaccggcattcccaatccccctttgcggataatagcccctaacggagcccctataaaaaagaaaatgatacaggcaaacgaaagcgtaaactttttgtacatctcgatctggtgacgcctgatgactttattttcatcgcccatcgtatagctgcgaaattcataatccgatttatatcgtccggctcttgccacggcacgatccaaatacaactgcttacgttggaggctgccgccgtcgaacaaactatcgagattcaactccgcagcctcggcgacagccttctgctcgcgtatcgaatcctctttcgaaacatgcatgcccggacggtcgtataaagcaaaataacccgatactttcaagctattggcataattatttccgatactatctacccgataagtcatcgagtcgatagaagattgcaatgccgccaagtcttttcctatgtattggttctgcatgataccatcgtccattcggttgaaattggcatcgaatgcaatcataatctccttcaacgagaaggtctcccgtcgatagggaatattgctggtgctcgtcctttggtccctgagattttcaaaagattccccgctatataacgttaagaaaagatgttctttatcatcggtcattttcaatttcccggaatcggctaaaataatcatggcattatcgaatccagccgacatatcataaatcatgacatcatagagcatacccgttttatgatctttctttttcacataaaggttatacccgctaatctgatcataaaatacaccctcgggaatatcgagttcgggagatttttgccgcatggaataaagcaatgtccacatctttacctgagatttcggcaaaacattattctggaaaaagaaagccccgatagcaacaaatataagaaaaataaccaacggccgcatgatttggagcaaagaaatacccgccgcctttatcgctaataattccaatcgttctcccaaattaccgaaagtcatcaacgacgctaacaaaatagccaacggcaaagccataggaaccattgtcacagcggcatagaaaaacaactcggccaatacggacatttccaatcccttccccaccatctcatcgacatacctccacaggaattgcatcaacacgatgaaaaggcagatgaagaatgtcatcagaaacaggggcaagaaacttttcagaataaacctgtatagtcgtttgatatagaacattctttcgccggttatcagaatgcaaaagtagcgcaaaaaaatgaatttccgaacagccgataacgattattgcggaagaacactaaattaaaacttccccttcaacctcttcaagaaaagtcatacacccaatttacgacggagagtctctatctggtggtcccataaaccacggctgtccgccatctcgtcgggatatgcgaaatcggtaataaccagcatagtcgccccggttaattccgaagaagatatgcgaagttcaaaaaaacttttctcatcttcatcgtccaaccaatgaaaccgaatataactcccgctacgcacagctatctgatgagcctgctgagaagacttattccaaaaaaaagtaaataatttctcttcgttttgcacatcgtcggcaaaccaatcggccaatccgttcttcgttcctatatacgaccacaacaaagttggagaaacactttttaaatcatactctacaataaacttttccttattcataaatctctcaatattatagtatttcccgcttaatttcgattaaagttctttctttttcggggctaatatatagatattatttttatcttacatagcaaaacaagaaaaaataaatataaaaagaaaattcgggatatttttatataatatttaccctaaattgcaatcttgatattacattttattactacatttgcaatgtctaaataacacataaaccaatccgactatgaatttaatggaacgaatggtagaacaagcccgagcaaacaaacagcgtattgttttacccgaaggaacggaagaacgtactttacaagcagccgaccgaatattggccgacaacatcgccgatattatactcatcggggaaccgtctgaaattatggaacttgccgatcggtacaagctgaaacacatcgacaaggcgactctggtaaatcctacaaaccacgaaaaaaaagaaacatatactcaacttctatatgagctaagaaaagccaaaggcgtaaccctcgaaaaagccgaaaagatggtcgaagatcctcttttcctcggttgcctcatgattaaaaacggagatgccgacggcgaagttgccggagctcgtaacacgacaggtaatgtgttacggtcggcttttcaaattatcaaaaccgctcccggcgtaaaggtcgtttcgggagcattcctcatgttcgtccccgatcgttcatacggagaagacggattgatggttttcgccgattgtgccgtattacccaacccgacagcttcggaactcgcccaaatagctgtatccactgcgaaaacagcccgagatatcgctaacatcgatccacgtatcgccatgttgagtttctcgtcaaaaggcagtgccagtcatgaaatggtcgataaagtagtggaggctacccgactggccaaagagatggaaccttctctaaaaatcgatggagagttgcaaaccgacgcagcgattgttccggccgtaggagcaagcaaagctccgggtagcgagattgccggacatgcgaatgtactggtattcccttcgctcgaagtaggcaacatcgcttataaactggttcaaaggttagctcatgccgaagccgtaggtcctattcttcaaggaatcgccgcaccggtcaacgatctttccagaggttgttcggtcgatgatatctataaaatgatagccattacttgtaatcaagccatcagtttgaaaaaataaccttaatgcatgccttatgaaaatattagtattaaattgcggtagctcgtcggtaaaatacaaattattcgacatcgactccaagtccgtattggcacaaggaggagcagaaaaaataggattggaagattctttcttgaaactaactttgcccaacggagaaaaagtaattttaaaaaccagtatgccggaacaccattcggctattcaaaacatactgaatgtactcaccggtaaagaatatgggtgtatcgagtcgttcgatgaaatcgatgctgttggtcatcgggtcgtgcacggtggagaaaaattcaacaaaagcgtgctcatcacagacgaagttatcgaaaaaataaaagaatgttacgatatagcgccgttgcacaatccagtcaacatggcgggtatcgaagcaatatccaaattgatgcctacggttccgcaagtaggagtattcgatacggcattccaccaaaccatgcccgcgcatgcctacatgtatgcccttccctacgatttatataaaaaatacgggatacgccgatatggattccacggaacaagtcatcgttacgtatcgaaacgagcttgcgagtttttaggagtgccctacgagaaacaacgcataattacctgccacatcggaaacggaggttccattacggcgattaaagacgggaagtctgtcgacacctctatgggtatgactccggttgaaggattaatgatgggaactcggtcgggcgatgtcgatgcaggagtcctcacctatttaatggacaaagaacacctcgattctgccggagtagcaaatttggtgaataaaaaaagcggagtggctggtatatcgggattatcttccgacatgagagacatagaagccggagtcgccgcaaaaaacgaacgggctattttggcgttacaaatgtatgaataccgaatcaccaaatacataggagcttatgctgcggcgttaggcggagtagatatcatcgtctttaccggaggtgtaggcgaaaatcaaaccataacgcgcgaagccgtatgtaaaccgttggcttttatgggagtagaaatcgatcccgaaataaataaacagattcatggaacggaatgtgtgataagcaccccggcatcaaaagtaaaagtagtcgtcattcccacagacgaagaatacatgattgcttcggatacaaaagccgttctgtccggcaaaatgaaataatatcttatacatacatgtcgagaaaaggcgtacgcattgtacgccttttttattttcctgattcaagattaatttgggagttttaattgagaaatgggttctccatcattactttcgctatctcaacaatcgtcagattacctaaccggtctatacgtacttataattttataaacaaaccggcggaggtaaattttatacctccgccgggaactactatatcacgtccaatttttaaggcagtacgattttgaagtttgaatcggcagcttcaaaacaacagcgaagcatttcaatagccttctcatctccttgcatcttaatcttgccagcattacgtaaggcttcggtatcagtacgtccaaagaacagctttacgaaatccattttggcgatactcaacgtaaggtctgcctccttctcctgtcgattcaagcgatggttcaaaacaccattattcaatataagcacaactttgtcgttcgtatctgtgaagtctatattgatgactgcctctttgtctgcggccttttctccattcaactgaatcgcgcaataatcgagtaacattcccatatccatctgcgccaacacaccatcgttaatgagctgtgaagtataagggacatcgcttttcagcaggtcacgagcgccggtcagatagaagttgcgccacggaccgctctcggcctgataccccagttgtgtgtaggtatcagccaacagacgacgagccgccatattctgcggctccgcaaatacaagatggtcaagcagagttgcaacccaacgataatcgcccttatcataagaagcccgggccacttcaagaaccttttccgcacctccgattgcctcgacatacttagttccgagttccgtagggggcagcggattcaagtgtgcagggtttccgtcgaaccaaccgaaataaagatcatactgagactttacgttatgactcaatgtgccataataaccccgacaatggaactgcgaagcgagagaagcaggcaattgcatctcttcggcaatttcattcggagtcagacctcgattggccatgtgcaaggtttggtcatgcaaataccggtataaatcgcgttgtgcctcccaataatctacgatgcgttcatttccccatgtcggccaatgatgtgtggcaaacgaaacctccacttcatcaccataacgttcgatagccgtatccacggctttgctccacaacaaaccgttacggacctttgcaccgcgcaaagtttgcagattgtgcatattatgcgtcatatcctcggctgtacagaatgctttcatttgaggaaaccataccataatttctaccggagcttccgtatcaagtacatagacaaattccatctctactccatcaatcgtatgtttctcaccggtggtttcgatctcgattgtcgggcgtgcaatacctttactaccggtagacatagcctgtcctaagccacagccgagattgcccgtaacactcggctccaattgcaggccgtacatataagtagcccgacgagtcattgccacaccggctagcacattttcgttttgagccgatgccatgaaccctttgggcgcaatgatttcgaaatctttcttcgatgacccctcgcgaatagctgcaatacctccataatggtcgccgtgcgggtgggtaaagataaccccttcaaccggcagatcggccacgtgtttcttaatgaggtcataaccagcttttgcagctgcattggtcgttgttacatcaataataatccaaccatgatcagaacgaataaaggtcatattggcgatatcgaaaccacgaacctgatagagtttatctggaatgacctcaaaaagaccgttgaagcgattgagctgcgactgtcgccaaagactcggattcgcagtttcgggaacatcgtttttcaagaaatcccaaccttcgagcgaataggactccttcccatcttcggtcatgatggccgaagtgttaactgtcgcaatgaatccccgactggcatcctcgaaatcctgacggtcattgaaatccaactctgtttttacagcctcgttagcacgtattgtatgctctgtcgctgctgtctgcgccataattgccgacggtacaactaccaaaccaaacgcaatactcaaaatttttcgtttcattattctctaaatttgattacacgacaaagtaacggagatatgctggatccggcaatgtattattctgcttatattttgtatttttgtacgattatcctatataattccttatatatattaagaaataatgtctttttgtatgcaagaccagatttttacatttgaaactctattaaggcgtatgcaactcgacgatggagagagacccttcgtaatatggcgtgaaaaggatttgtttggcgcacatgcctatccggtcaaaatcgatgttccatgtctctttttatgttggaatggggaaatggaaatagaaatcaatttacaaacctatcatttcgataaggagcatttactatgcttcactgttccatgtgcctgtcgcattgtaaaacggagtcccgattttctatgcgtcggactgctattatccaaatccttttggaggcaattactctttacagaacgaacattaagctcaattgccgcgcacgatgctttcatcatcgttacggaagaggaacgaaatcggcttgctcgttttcatgaactgctttgcctttgtgccgatactaccgaacatgatccgatagggactttatatcccctcatcgtcggtctattttttcaaatacgcaatatctgccaaaaccgggaagcaaccgcagcacctgcctcgcacagcaaaaagattctctatgatttcttagattcactgcacaccaattaccgacagcatcggcgtgtttcattctatgccgatgctctgtctctgactccacgacacctgacaactgttatccgacaagcaagcggtcgcagtgcctcacaatggatcgaggaatataccgtactcgaagctcaaattcttctacgcaactcccctatgtcaattaaagaaatcgcctatgaattgggtttcaacgaccaatctctattctcaaaatattttagtagagtggcaggcatatcgcccgaaagataccgcaaaatttctatgagcaacacatgatagtcgctaatattcgctacctgtactgacttcatacaaaaaaaattagacagatagctgtctgccatctgtctaacatgatacaaggaattattttgctctttattctatcattaagctcctatcaagctgagatctgtgaagtaggtatagacacaacttacgattcccaacagtaaaataccggcgacacaaacaatcaggctgacacgggaagcgttatcgctacggaacggagctatggcacaatcgttctcgttgttgatgaacatagcttttaccaccaacaaatagtaataaagcgaaataatggtattcaacaaggcgataagtactaaaatatagaatcctgaatggatagccgaagcaaaaatgaagaatttgctgaaaaatccggcaaagggaggaattcccgccaaagagaacatcgccaacatcataacgacactcaacttgggattggttttgtacagaccgttatagtcgtccattcctacctttccactactacgctcaacagacgatatcacaccgaatgcagccaagttggagaatatgtacaccagcacatagtaaaccaacgcagccataccctgtgccgaacctgctataatacccaacataatatatcctgcctgagagatagaagagaaagccaaaaagcgtttcagattcttctgacgaatagcgaacaagttacccactgtaatggtcaacacgatcaaagcccacatgataccttgccagatgacaggatctaggaagaagactttgtaaaggatcaacatcaatgcaaaagcagcagcccctttcgatataaccgacaaataagaagtcacctgtgtgggagctccttgataaacatcggctgtccacaaatggaacggaaccagcgaaagtttgaatcccataccggccaatacaaaaacgagcgtggcgatcaacagtggcgtgtgattagatgcaatcgctacggctatatcgccgaaatagagagagcccgatactccatagaggaacgaaaggcccaacaggaagacagccgaagagaaaaccgccgtaaagaggtatttggctcccgcctcatacgattccgtatctttcttattgatagctatcaaagcggccatcggtaacgatgcggtttcgagtccgataaagaacagcaagaagtgtcccgacgaaaccattaaatacataccgaacaaggtaaccaataacaattcgtaaaactctcctcggcgcaatttgacatcgggggtatcggaccacgaaatggattgtaacaaaacaatcaatgtgcctatattgagtacggttttaaccatcgaagctatgggagaagtctgatacatacccccgaacgccgtagcagaatcgaccggtattatattccaaaccgtatgcagggcgaataaaacgcatgccgtaatggataatcctttgaggctctttttccctccaaaggtgtcaaaaagaaatatcagcaaaaacacaagcagcagcgatatttctccgcgcataattaaaaactgtgaatagtccatatactgttttattaaagagcttgagacaacaaattagttataggttccacaccttgacgaatcaaatcggcaatccaattcgggaaacagccgatagcggccacgcatacgatcaaggtaatggccgacagacgttcccaccattcggcatcggtcaactcccggtgatgttcgttctgaacagcgccgaacaaaagtttaccaacaacccgcaaaatataaaccgccgtaatcacaatcgaagtacaagctacgatggtaaacactcggtggaacgtatctgtatgctcgaacgaaccgacgaatatagtcatttcggcaacgaagccactcaatcccgggagacccaacgaagccaaaccggcaatcacgtaacaaaccgaaaggaacggcatgatttgcatcaaacctcccatctcccgaatatcacgggtatgtgtacgtccataaatcataccgatgagggcaaagaaaagagcggtcatcaaaccgtgagaaagcatctgcatcacggctccggtcatagccgtcgtgttcaacatcaatatggcgaacaaaaccaaaccgcagtgactcaccgaagagtaagcgttgatgtatttgaggtcggtctgaacacaagcgctgaacgctccgtaaactacactgataccggtaagtattaagaatatccaagccaattcggtcgcagcctgaggcatcagataaatggctacacggaaacaaccgtatcctcctaatttcatcaatacgccggcatgcaacatagacactgccgtaggagccgaagcgtgaccatcgggcgaccatgtgtggaacgggaacatagcccccaacacaccgaatcccacgaaagtcatcgggaacaagaagtattgccagttcatggggatattaccgtgctcggcaatttcgactacattcatcgaatggagccccgattgataatagatacccaagataccaatcatcaacaaagcagaaccacccatcaacatcaaggtcagtttcattgccgaatagttctttctgccgcttccccaaacacctatcaataagtacatgggaataagcgccacttcgtagaacatgaacatagtgaaaaggtccaccgaaataaagaaaccgaatacaccggtagacaacaacatgaaccacaagaaatattctttgggaagaggatttatcttccaagaagcgaacactccggcaaatacaataatagaagaaagcaatagcatggccactgacactccgtccacacccacagcatagtgaatatttaacgaagcataccacattctgctatcggtaaacagcattgtagccgtatttccggcagcgcgttcggccaaaaactcaacgagagtatatacagacaacgccaacaaaatggtcgaaccgataaccgctaccgttcgtatctgtttcatatctcttgcgatccaaagacccagcatcatcaagagagggataagcacaaataatgatagaaaattcatagtgtttctttaatattttatcgttcaaccatcagttaaaaacacatggccaatacggcgattaacaatgcacccataatgaatacccatacataccactggatatatcccgactgcaacttgcgtatgccgtaggaaaccccgttggtaacggtcgccaacatattcatcgtgccatcgacgatatgacgatcgaaccatgcgataggccgacaaattcgctggaatatcactttatgagtcacccacatatagagctcgtccatatagaatcgatgataagccgccgtatgcaaagcacggaacttatcggcaagagctttgggtttggtattttccgagaggtacatccatgtagccaaagcgatagcggctactgcgactataatacttgtagtcgctaccgaccagtcgagatgtatatgataggcctcgccgtttaccgatacgaattctccgaaaggaatgaatccggcaacacacgtaaccaacgcgagaaataccaaaggcaaatacatggcagcaggagcctcgtgcggagtatgatgttcgtaagaaggtttgctccaccagaagatacggtaatacaagcggaacatgtaaaaagccgtcagaccggcgacagccgtcatccaaacgccccagaacgcactcttttcgaatgcggcggttaagatttcgtctttactgaaaaatcccgagaacggaggaataccggcaatagccaaacatgcgataaggaacgtgatatgggtcacaggcatatatttgcgaaggtttcccatctcggacatttcgttggagtgaacggcatggataatgcaacccgcacccaagaaaagcagcgctttaaacatggcgtgcgtgaacaagtggaacatggaagccatgtaaccgagtccggtgtgcaaatcgacatcggaggcaactcccaacgctaccatcatgaaagcgatctgagaaatggtcgagaaagcgagcacccgtttaatatcggtctgcacgcacgcaacgacagcagcataaagagcggtaatggctcctacccatgtaatcagttcgagcacttcgggcacggcacaatacatagggaacaaccgggctaccaaataaacaccggctacaaccatcgtagcggcatggataagcgccgatacaggagtaggaccttccatcgcatcgggcaaccatatatgcaacgggaacatagccgacttacctgcacctcccataaagataagagccatagcccaagcggctaccgaacagcccataaaggtcatgccggccgtttcgctcaccaatgccgaaggattggacatcaatgtagcaaaatcgaaagtctcggtaaagaacgagaggataagaataccgatcaaaaagcccaagtcggcgaaacgggtaacgataaaggcctttttagaagcagatacagccgccggcttagtataataaaatccgatgagcaaataggaagaaacacctaccaactcccagaaaatatacatttggaaaatgttcgtcgctaccaccaaccccaacatggagaagctgaacaacgacaaaaacgcataataacgctggaaccctttttctccatgcatatagcccatactataaatatgaaccatcaacgacacggttgtgataacaaccagcatcatcacggaaatagggtctaataaaatgcccaagtcaatatgcaaatgttctgtaaaacgcaaccattcgaaattgatcggctgcaaggtgtcgaaaacgccttctgcattgcggggcatggtaaaatagttgaacgccactacataagccaaaacggcagctaccgacaatccgattgttcccaatatcccggcaacacgttcgctcaacttatgccccacaagtcccaaaaacaggaacatgcaaagcggaagtaaaagtattataactgaatattccatatcgatcaatatttcattttatcaaggttacgcgcttcaacattccgtatatgacggaaaatattgataatgatcgcaatagcaagcgctgtctcggcagcggcgatgcctattgcaaagagggtgaaaaagaatccctccaatgcctcgggataaaggtaacggttaaacaccacaaaattgatatccaccgcattcagcatcaattcaagggaaatgagcatagccagcatatttttacgtgtgacgaacccgtaaactccggcaaaaaacatgatggtacttaccaccaaataggcaatcattggtatttccatagtctcttatcttttacgggcaatcataatgccaccgatgatacaagccaataacaacacactgacagcttcgaaaggcaacagatactgaaacttgtccatacccataagagcatgccctatttctttcatatctacctctccggtaattacgctggtaagcggtttcgtgaaaaacggataagtaaataatgtatatccgcacacgattgcaccgaatatcgaagcaataagacctactacacgttttttaggtgtcaacaattccgatttgtctcccgggtgactcgtcaacaagatagagaagacgaacaagactacgataccaccggcataaacggccaattgcacggctcctaaaaatgtatagtcaagctggaaatagatacccgccgtcgcaaaaagcacaaacagaaggtaagtagccgcccgcaatatgcgccgcgtggttaccgtaagaatcgaacaaaccacgatgaccaatgcaagcaagccgaagataacttgatttgctatttgttccataatgttaatcaattattttctgttgggttatcggtacgattcagttgtttcaccaacttctcacgcgtataaacggcatgctcaaactcgtttgtaaatttgatagcatggtgaggacatgtagtcacacacaattggcaaaaggtgcaactacccaaatcatacacatatttatctaacactcgtttcgtcttaccatcttcggtggtaattttcgaagcctcgattttgattgtcccattcgggcaattcatctgacaaataccgcacgcaatgcacttgtgctgtccgttttcgtcataaatcaaagttaacgtacctctgaaacgctcggggattttcaatgtagccctattctcagggtactgttcggtaactttccggctgaaaaaatacttaccggtaacccccattcctttaagaaggctcagtaatcctttccagaaagatgtgatgtaatttttaaaacttcccataaatttctttatagaactcttctatttttattagttaacactatggtttatttcgttcataaaaaagagcttggttcttcaagccccttgatttcaatctacttttcctccgataatatccaacaattcggacgtaatactctgctgacgcagtttattatattccaattgcagttcgtccaacaattctttcgcattatcgttcgccgactgcatggccatcacccgggccgcctgttctgacacccgattggaacagatagcctcctgcatactcgacagaacataaagcggtaatacctcattatagatcgtattcacatcgggctcgaacaaataaggtttattacgctcgactttttcacccgtcgccaaatcatcggcggcaatcggcaataattgacgagtcgctaaaatctgtttgctcgcgcttttataatgagtatatacaacttccacgcaatcgacttttccggcaataaactcccgcgtcaattctccggtaaaacgggcgatatcctcggcagagcttttagcggtcatttcatcggcagtaacatcgacattatcccccacaagtttttgagcgaatttagaggctttctttccaatcggataaacaacaaacatgactggattttcggtctctgccattcgtgcctgattgataatttcgagcgtgcgtttaaaaagattcatattaaatgcgccacacaatccctcgtccgagctgagcaaaacaatcgccctccgctttacgggacgaatctcggtaagcggagaactatattcagcatcagccgaaataaggtgatcgatggtgttttgaatttgatccctgaaaggccgtacacgacgcaaagccgactcggccttatgcatcttggccgatgaaatcatcttcatcgcaccggttattttttcggaagaagcgactgaaccgattcttccttttaagtcgcgcattgatgccatagtttatgccttaaatcgattagcaacctcttcggcaacttcggtcatgagagcagcaatcttgtcgtcaagatgtcctgcacgcaattcgtccatcacttcgtggctatattttgatttcaatatttgcaaatacaatttttcaaactcggctaccttgtccatcgggacattgtgcaacaatccctgtgtaccgcaatatataatagcgatttcctcttccacgggaaccggcgaatactgaggctgtataagaatacgttcgttcttacgccctttatcgattgtcatggccgtcacaggatcgacatcgccaccgaattttgtaaacgattcgagctcacggaactgagcttgatctattttcaatgtaccggcaatcttcttcatggcttttacctgagcgttaccacctacacgggaaacagagatacccacattgatagccggacgtaccccttggttaaacaatgccgtttccaagaatatctgtccgtcggtaatcgaaatcacgttcgtagggatataagccgaaacgtctccggcctgtgtctcgataataggcaatgccgtcaaagatccgccacctttcaccatcggtttcatcacctcgggcaaatcgttcatcgaagaagcaacctcgtcattattgataatcttagcagccctttcgagcaaacgggaatgcaaatagaatatatcgcccggataggcctcacgaccggaaggacgacgaagaatcaacgaaatttcacgataggaaaccgcctgcttcgataagtcgtcataaattaccaatgcatgacgcccgctatcccggaagtactccccgatagcagcccccgcaaaaggcgcataataacgcatagcagccgaatcggaagcgttcgctgccaaaacgaccgtataatcgagcgctccgtgctctttcaatgtattcaccaacgcagccacagaagaagccttctgaccgatagctacgtaaatacaatacaaggggttaccgtttttataattatctcgttgattgataatcgtatcgatggcgatagccgttttcccgatttgacggtcgccgatgatcaactctctctgtccacggccgataggaaccatagagtctatcgccttgataccggtctgcaaaggctcgttcaccggctgacggaaaataacacccggagccttacgttcaagaggcaatcgaatcaaatcaccctgaatgggaccggccccgtcaatgggttcacccaacgtattgatgacccgccctagcaatccttcgccaacaggaagagaggcaatctctcccgtacgacgagccgtcatattttcggtaaccttatcgacattatcgagcaaaatgacacccacattgctctcttcgaggttcatcgcaactccgtgcactccattctcaaactcgataagttcgcttgaccgcacattttcgagtccatagacatgagccaccccatcacccacttcgagaacagtacccacttcctcgaaattgattttggaatcgacttcatcgagttgcttttttaaaatatccgatatttcactgggtttaatcatatcatttgctgtttagcaatttcaaacgcaatttctttaattcactatttaccgaagcatctaattgcatcgaatccacccgtaaaataaatccgccgatgatagaaggatctatttcataaacgaattccaacgtcttatccgtttgctttttcatgagatcacctatacggtcgagaacttccttatccaaagcaacagcagttattatcgtaacacgagctatatgattagctcgccggtaaatatcctgataagccaaagcaatggctcttgcaaacgtttcgcgacggttcctaatcactaactgaacaaaacggagaagataatcgtcgggcttttcaccgaaagccgatgacaatacccgcaccttatccgcagcagagagagccgggttactcagtgccttagacaactcggtatgagttgcaaaagctgcatcaagccgtttcatctcttcgtaaataggagcggccacatgatgctcctgagcatacttataaagagctttcgcatatcggctcggtattaacccttcgttcatatcctattagttttgattctcaatttcattcaacagtttgtcgatcatttcgacctgcgttttgtcatcagaaagttgcttacgcatcattttttctgcaatttgcagggcaaactcgcttacctcgcggcggaattgaagttccgactcttttcgagcttgctcgatcgacacggccgcagcgtccattactttcttcgcctctaccgatgctgcctgacgagcctcctctatgatatgagttttcatctgggcagcttcgtgcagaatctccatctgttgtttctgcgcttcgaccaaaagagctttggcatccgcttgtgcgttgtctaattgcgcttttgcctcttgtgcatactcaacccccttatcgataagctcggcacgttcgtcgagactgcggataatatagggccaagcaaacttcgcaagaatggcaaaaaggatgacgaagacaacgaacatccaaaataccaagccgaattcgggcgtgaacagttccatatcttagaggaataatgacatcacgcaaacaatcacagcgaacaatgcaacaccttctacaagagcggcaatcacgatcatgttgcttcggatatcaccgctggcttcgggctgacgagctatggcatccatcgccgatgaaccgatcttaccaataccaatacctgctgcaatagcggcgataccagcgccgatacaggcgcccaacttagccagacttgcaccggctgctgcttgtaataaaatcattcctaacataatgtttgttgtttagagattatacattattttatttcttccacttttccttcatgatgcccatcgacttgtgccaaagctatgaacagagtcgaaagcatggtaaacacataggcttgaataaacgataccaacgtatctataagcaacataaacaaagagaacaacaccgatacgactgtcgttgcccctataacaaccgctccgaatgctccaaaaatgaaaatgagcgatataagcgacaatataatcatatgcccgcccatcatattggcaaacaaacgcaccatcaaagccgccggtttggtaaatattccgaacacctcgatcaagggcatgataggtaacggaaacttcaaccacaacggtacatcgggccaaaatatttctttccaatattcttttgttccgcgcacatttactacgataaatgtacacaaagcaagaaccatagtaacggctatattacccgtcaaattagcgccaccggggaaaattacgatcagccctaacaggttcatcaaaaggataaagaaaaatacggtcaataaataaggggcaaaacgaggtgctttatcgcccaatgtgctttttatcacgcccgtataaacgaactcgataagaaattctatggctcctacaccttttttaggggctttgaaacgtttctttctataccaatgagccaccgaaagcacacaccacccacaaatgaatgccgctataatcaacgccaacacatttttggtaatcgacaaatcgagcggacgataacgatttcccctatcatcgacactctcgacctttcctttattcgggccgtcctgagcgacataaaaaccttcataagtctgcccgtgttcaagccgatgcgacccgaatattttccaatcgcccttataatcccgcacgataaccggaagtgggattttatgctcatgcgagaaaggtaattcccaaccatagccatcgagcaggtgctcaaaaattgtctctttcgggtcaaaggacttttctccttcaccatcggccttttcctgtgccgacagcgggaacgaaaataccgttaacaaaaaagcgactatgtatgcgatttgttttctcatctcttttttactccaattaccgtacacaaactgctacacgattattatccacatcgacaaacccgccaccgacggataccgaatgccgctcaccgcccgttacatactcaatggtaccggcatcgagcgtagaaatcaacgatgcatgattttcaagaactgtaaacgaaccttttgctcccggcagggtaaccgattcgacttctcctttaaaaaggatttgttccgaagatataatttcaagtaccataattctcgtttttattagtgagcggtcttcgcttgttctaacaacttcttacctttggcaatggcctcgtctattgtacccacgttcaagaatgcttgttcgggatattcgtccatctcgccgttaagaatcatcttaaacccgcggatagtctcttccaacggaaccatcacaccttgaagaccggtaaactgctcggccacgtggaaaggttgcgacaaaaaccgctgtgcccgacgagcacgattcaccaccagtttgtcttcgtccgacaactcatcgacacccaaaatggcgataatatcctgcaattcgttataatgctgtaaaagctgttttacaccctgagcaacctgatagtgttcctcgcctacaatattcggatcgaggattcgggacgtagactccaacggatccactgccggatagatacctaactcagaaatcttacggctcaataccgtcgtagcatccaaaaagctaaatgtagtcgccggagccgggtcggtcaagtcatcggccggtacataaatggcctgtaccgatgtaatagagccctgcttcgtagacgtaatacgttcttgcaacttacccatctcggaagccaaagtaggttgatatcccacggcagaaggcatacgacccaacaatgccgaaacttcggatcccgcctgagtgaaacggaatatattgtcaataaacaaaagtatctctttacctccgccatcggaatcacggaactgttcggcaacagtcaacccagacaaagcgacacgcagacgggctcctggcggctcgttcatctgaccgaacaccaacgttgcctgcgattcattcactttctccatatcgacatcacgcagattccactcgccccgttccatgccttctttgaatttatcgccgtacgacataactcccgactcgatcatctcacgtaaaaggtcgttaccttcacgggtacgctcccccactccggtaaacaccgaaaaaccgttgtgccctttggctatattgttgataagttccataatcaacacggtcttaccaacacctgcccctccgaacaaaccgatctttccaccttttgaatacggttcgagtaaatcgatcaccttgattcccgtataaagcatctcggtactgatagagaggtcgtcgaaagccggagcctcctgatgaatcgattttaattcggtataatccaatgcaggaaggtggtcgatcgtttcaccgatgacattcatcaaccgacctttcacttgcgaaccggtaggcatcgataacggtctttgcaagtcgatagccttcataccccgtttcagtccatcggtagaatccatcgctacacaacgcaccgtattttcaccgatatgttgttctacctcgacaatcagctctgccccgttctctcgttcgattttaagagcggcatatatgggaggtacttcattgccttcgccttcaaaagcgacatcgacaaccggcccgatgacctgcgtgatatatccaaatttatctgccataactttacctctattatcagtattatatttttaattcattaaaagtgcaatccgtaaatcacaataagcaccataataaagagattaatcaagttcaaaggtaataaatatttccattcgagccgcaataattggtctattctcaaacgggggaatgtccacttgaaccaaataatcacaaacgaaacaagtatcgcttttccaaagaaccaaatcacagacggaatataatccataatatggttaaaaccttcccaacccggtatgtggaatggcatccaacctcccaagaaaagcaatgtagccatacccgacacaataaacagattcaaatactcagccaagtagaaaaatccgaaatgaatacccgaatattctgtgtggtatccggctgtcaactcgctctcggcttcgggcaagtcgaacggaccacgattggtctcggccgtaccggcaaccaaataaatcaaaaatgcgactatcgccgggatatgacctgtaaacaagaaccaaccgttagtctgagcttctactataccggttatcgacattgttccggcaaagacgaccatcgtcaatacagacaacccaatcgaaagttcgtaactcaccatttgagcaccgcttcgaatagcaccgataagtgtaaatttattgttactggaccaaccggccaacaaaatacccaacactcctatggacgaaacggcgatcaggaagaacacgccgatattaaaatcgataacttgtaatcctcttccaaaaggcaaacaaccaaaggccaacatggaagcgacgattaccaaataaggagctaaattaaataagaacttatcgatatgattcaaagtaatcaactccttaatcaatatcttgaacatatcggcaacactctgaataataccataaggacctacacgattcggacccaaacggcattggaaaaaggcacagaccttacgctcaaaatatatatagaacaatgccaaaactgcatacaacagcaacagcaccacgcctaccaatacaaattcaacaagtaaagctccccaaccgggcattacacttctcaacaaattatcgatccagtgggtaactatcgaaaagtcgaacataacttattctttaatttattttttattactcaattatctgtccatatcggggattacatagtcaagcgaccctccgatagcaatcaaatcggcgatctttccattgcgacacattggatcgagaccagcgaccagcggcaagcatgccgaatttatcttcaaacgataaggattcttatctccatgactttcgataaaaatacccaacggaccacgactggcctctacttggcggaaataacggccttcgggcagcttgataataggcttcatcttaacggcataatcaccctcggggatattgtcgatcaattgctctatgatatgtatagattccaatatttcatctaagcgtaccatgtaacgggcaaaaacatctccctccgtacggataacttgattaaattccaccttgtcatacattgcatacgggtgattcttacgcacgtcgcaagcccaacccgaagcacgccccgacggtcccgcaattccatacgaaatagcatcctcgcgagaaagaattcccactcctttcatacgttgttgggcaatgacattaccggtaaacaacgtgtggtactctttcagcttagccggcatataggcacaaaactctttgaccttacgctggaaatcgggatgtaaatcggccatcaaacctccaatcgtatagtaattgaaagtcatacgcgcaccacacgtttcctcaaatatatcgagaatcttttctctatcgcggaaaccatagaagaatgctgtcgttcctcccaagtccatacagaatgtggaccagaataacaagtgcgaagaaatacgcatcaactcgtccatgatcgtacgtatatactgtgcacgtgcgggcacttctacttgcaaagcatcttctatacaaagacagactgcatgtcggttctgctgagcggacaaataatcaagacgatcggcgaagtgaagagtctgaggataggtaagagactcacatagtttctctattcccctatgcacataaccgcaatacacatcgatttttttaaccgtctcgccatcgagagaggtacgtaaacgcaacacaccatgagtcgcaggatgttgaggaccgatatttaccacgaattcctgaggagaaaatatcgtattcgtccgttcttcgagctttccatcttccgtttcgacaacggagtgtgtgacatcatcgacagactcatgctccaatcggataggattcaattcagggtctgcattataatcttttcggaaaggataccccacccagtcgtttcgcaaaaacagccggcgcatatcggggtggttgatgaaacggattccaaaaaaatcatagacttcacgttcgtataaattcgcggatttccaaatatccgaaacagaatgaagcagaggattctctctatctgcggtctctattttaaccgaaacttgtgaattatcgacggtagaagtcaaatagtagacacaacccacggtctcgccccagtccatgcccacaatagaaaccaaataatcgaagtgcagttgattatgcaaataaagcgctaaatcatgccacttggcatcaggaaccgacacttccaaaatagtcccttccacgaaggtagcctccggcagaaaactacttatttcttgctgtatgtttgccatataggtaacttatattattttccgaatactttctctcgcttttcttgacgattgaccccgccaaagaatttctcgacttttaccttacgttgtaattgcatcaaaccgtaaaacatagcctcgggacgaggaggacaccccggtatatacacatcgaccggaagaatctcatctacacctttcaacacgtgatacgaatttttaaacggtccgcccgaaacggcacatccaccgacagctaccacgtatttcggttcggccaactggtcatacaaacgtttaagaacgggagccatacgatgtacaatcgtaccggccaccatcacaaaatcggcctgacgcggactggcacgggctacttcaaacccgaaacgggccatatcgtaccgcgctgcgccgagcgacatgaactcgataccacagcaacttgtcgcaaaggtaagcggccacaaagagttagaccgcccccagttaataagttcgtccaagcatcccaccaccacattggtatgagaggctttgagctcatcaacaagatgttcaatatattcattgtctttgaagtcttcatacttcatcgatttaattttcacttccattcgagtgctcctttcttccatgcatataccagtcctaaaacaagtataaccatgaaaaataaaatattaaataatccggctacacctaaatctttcaatataaccgcccacgggaacaagaataccgtttctacgtcgaacatcaaatacagaatggcaaacaagtagtaacctactttgaactgcatccaagattcgccgcgcgatgggataccacactcataagcctcacctttctgtgggttgaacgagcgaggcgaaataagccctgcaatcaacaaagccgcgcccaccaacgctaatccggtaatcaatacaactacaaatagtgcagaattcatacgttaatttagtttgtatttatttttattcttttctccaaatgacaaagccctatattgctaaaacaacaatacaaggcccgatcgtctataaataaaaaatctttctcttttcataagaaaaagaaatacgacatcgctccattccggtattagtctcgcgatctgatattgtcttattccatatagaaccaaacatacgatttcttttctttcttagtcaaggatttatacaacggacaaatttattttccgaacgatgaatatcaccccaaaatcctttgtttcactgcaaattattcttcgaaaaattttgtcgcacaaatatacgaattttatttccaacaaaagcctcacgttagactcttttttatttttaatccgcaattccggacaaattattctgcttttggaacaccacctcaaaaaaattgcgcgacaaaaatagtttgtcacgcaatgaatacattcaaaaaaactcctattacaacgaatcgagagttttaagagcttcgagaatctctgtattacccggatccaattccagcatcttgttccaataatcttttgtagccgcgatagcctcgtttttcttggccggattggtggtttgcagataattataatatcccaaatatttataagcctcgatataaacacgttttgtagcagctttctccttattggaaggatcttgatccaaaacagtcaaagtctcttcatacaaaggtttggccaacccttctttcaattcagggtcacgcactgcggccgcacgagagcgccacaaatatccccgataatccgtcggagaacgctctaccacaacttggaacatagtatctgctttcaacaaatacatattcatcaactccacgctatcttgtgcagcttggcctgcactataacaaatttgaccgagcaaataatagtccatgacacgttgattattcaccgtatcggcattcatatacttctcataagtatcgattgcctttacataatctttattacgctcataggtatcgctcaaaactttaagaatatccgtacgggtattatccagttcataagctttttcatattgagcaacggcttctccatacttcttttgtttggataaaatatcgccatacgtcatataatcgcgcgccgtaaacacattatcacccggattcattcccaagaactcgattgcagcctgttctgcggcctcaaaattccccagttcataattatcgtacataacgatacgacgaataacaaagttttgaggatcatgagataaaatatcttttgcaagttccaatgactcatcaaagcgtttgccatagaacaacagagtagccaaccggggacggtctgtttggaaatggttggggttctgcatatacttctcataagcctcggcagcctttgtatattgagaattcttataatacgcttcggccatctcacgttgtgcaatagcagaattaggagcgatagtttgcaactcttccaacttttgaatggccaatgtcggatttatatcgaaataaatatgcgagtatttcacatacgcttcgatacaattagggtcgaaataaatcgcattttcataccgtccacaagcatccccatactgctgttggtttaccaagacatcgccctcaaacataaaataatcgggaaacttcttgtctgctttataagacttcttcatatactcctcataacccggagtcccggtctcataatatgctttggcaattgccaaattaagaccggcatctttcttattttttcctttaagtgcttctttgaaatatttttcagccactttttcagcttgttccttatctgcacttccattcaatgcgagcttaccttgaccgacgagattataagcgaacaaaggatcggcttcaagacctttcttatagtactctgcggcagccgtatagtccttgttgccaaacgctatctctcccaaatagtaataagattctgctttattcgttcctgcatcatcaagggtgcgttcaagcaaaatttttgcccgatcgggttgacccgctttaaaatactctattccatcagtatagctggcagcaaaagcagtgaaactgccggcagcaagaaacagtgaaaaaaataatttaagacttgatttcattgatatatttttaaattaataattttcttacttaaaaagcatcggtaatgcttacatctctttttaacgcaatattagtttgccacggtacaataccggtcttaaaaattattaactgccctctttgagaagacacaaacttaataaagccggtaggcaatccattccgaggatccgttgtaatcatgtaaataggccgagtcaacggataatctcccgacgctatataatattgatagggtttatagggtttaaatcccggtgctttacgcacagccattacttttacgacatcggtaaacgaagtattggtcgagtctgctttattcccaatccagcttgctcctattacccctatcgcattaggcgtttgagccacataatcgatcacagcctgattggatttttgggcaaacaaacctttatacagagtttttccctcgcaaagagaatctatggcataacgcatagaactggaaccttgattgtcgaatacaaaatgaaggtctcccaacgtagatcccggataaatctggttccatttcgtgacctctcctgttacgatctttcgcaaatcatctaccgaaattatatcattcttgttagatttattcacaataaaagcaatgccgtctaaggcgatttgcacggtgcgcacctttaaccggcgggatttaaaagaatcttcttctttcggggataacggacgagtagcaatagccaaccgcacactatcttgcaaaagcatattcaaggcttccgattcacttacataataaggaataatcgaagccttcgggtaagctgcttcaaagaccatgatttcttgctccataatcggctcgaaactttcgtcacagctgatatctatcacacccgacgtgatggtctccttaaccttttgtccctctttttcttcattctggcaagatgaacacgaagacaaagcagacgcggctacaaaaattgcgactggaagtaatattagcttattcataattcgttttatttcattccaacaaacaatctatatcctctaaatactccatatacggcaaatacaccgcccataatatagcgtactatatcgtataaattggaaaacaatgaagtaaataacagcaaataggccatacctaaataaatagctatcataatcatgccgaaaacgacattcatgcccaagcggttcttcttttccgtatcatcgttgtaatggccatacttttcttccataatcgaactttttaaaatacccgcaacctaaaatctatgataataggctgcgagtactatatttcacgaatctcttcttaaacaaacaagagattacaaaagtttaaatacaacaggcagtgtaaaataaactggcacattattaccgttttgtttacccgggatccatttaggcatactcttcactactcgaatagcctccttatcacaagtaggatccaaactacgcaaaaccgtaacattatcaatcgttcctgtcttcgaaacaacgaaacgcaaaataacacgaccctgaataccgttttcctgagctataaccggatatttgaggttatcacgaataaacttcatcaactcggtctctccacccgggaaagtaggcatctgttctactgcctcgtagggcttttcttcctctacgacaggctcggcgattacttctcggaaatcagcgatatcctgtccgtgttcttcgtcattacctttcacatcggcaatagaaatattcactttggattgtgtcaattcatcttgcgatttcaattcttcttcatcagacacttcctcgtctttcttaatgacaggtgcagtaaacttaatggagctcttcaacggagggggaggaggagtttcaaccaacggttgaacttcttgtttctctacctcggcctctggcaattgtgtcatctccacaactactgttgtctcttcttcaacttctccgaacttaaatgactcgacaatatagggaagtacgaaagcaaatgcaaccacacagattacgccaacggtagcccatgtatatcgcttcggcgagttaacccgtaaaagataccctccaaatgctttgttttttccctcaaaaactaaatcgcaccattctttcgaagttaaatctacgttctttgacatttctcttcttttttaatgtgtactattagttctttttactggtgtctatctgatcggaaagagcacccttcttctcataattctccatcaggaacaaatcaccttctgtgatgtcaacgatagcatacttaccgatactgcaaatgatcatctcatcaagagcatctatcaaattgcggtaagtcgcaccgttctttccttcttcatcgggcaatttcgctttaatcatgaccaccggagcgcctttggcttttttggcatctacgaccaacgagtcaaaaacttcttcactgatctcctcgcgttttttacgttccttcaaatctttcaccttggcaacaacttctttgttacgatcaaggagcaaggctctgataccatcggcattataagatgtctcgatcaacgaagtgtaatcttcgtactggggctcacccaaataatagaataccctgtcattatcgcccaagaggattgtgatagcctccgaagccttcaccttattctgctcttcttctgttaccttatcgttggtaggcatactgatttccatcgtctgcggtttactcaacgtagtacaaaacatgaagaaggttatcaaaagcatgttcatatcaaccatgggggtaaagtccacatggattttcattttcttctgttgacctttcttaccgcctttacccgagtcttttacttctacttctgccataatttttctttcctttcatgacttggttattgttcttcttctgcgggtaaagtcttcaacgacgtaagcagattgtaacggttttctttgatatcctgcaacgaagacatcacgtttttgattttgtcatacggtgtagcctggtcggctttgatggcaatcttcaaatcgcgatttgcttttcgtgcagcacgcacccattctttaaactcgttattggcgctatcgcacgggataccataatttttcaaagtttgatcctgaatatcggatttcaaatccaagaatcccggcatttgtttgataggcacaccaaacgaatttgccaatctgaacttatttatttgctctggagtaaacggtactccgtacatactactcattgcgttcaatacattcaccctatcctcttgtttgtcgaggctgataaagattttcccggacggttcaaccaacacctgcagaacattaatttctgggattttgatttcagataccgaagatggggtactcacttgcacaggctctttctgaacgaaggtcgatgtcagcatgaagaaagtaagcagaagcacggtaacgtcactcatcgctgtcatgtcgatgagcgtactcttcctttttacttttactttagccatataatggtcctttcgattttatgccgattacttgtgagtagcagcgaacgtgttaacaatacagaaacctacctcatcgatagcgtaggtaacattatcaattttgttagagaaatagttatatgaaataacagccaaagcaccggttgcaataccgaaagcagtgttcacaagtgcctccgaaataccggtcgacaaagccacagagtcaggagcaccggcggtagccaaagcttggaacgatttgatcatacccaacacagtaccaagaagtccgaccaaagtacccagcgtcgtcatagtcgctacgataggcaaattctgttgcatggaaggcatttcaagagcagcggcttcttccaattgttttttgatagcctcgattttttgttctttcgacaaagtatcgtctttttcaacttcgctatatttaatcaaagccgaagaaacaacacttgcaacggttccacgttgtttgtcgcaaagagcctgagcaccggcgatgtcgcctttttccaaagcagctttcacggcagcgataaacttattggtatttccttttccttttacgctaagcatagcgatgaaacgttctaccgaaagaacaatcacagtcaataacaaagtttgaagaataggtacgataaaacctcctttataaattgtacctaacaaattcagaggatgtcctccggcaggatctccaccttcaaagttttcaggagcaccaagtacttgggtaaatactaccaaagcaacgataaaacagatgataattacaataaacgcgtttttaataccgcgcactttgttttttttagcctttttagcttccataattaaataaaatctaagtgtttgtattagttattttaaaattagtatccaatcctttgtaacttcctatatcagtatctccactcattgtgtttccaccctctataagaaacgcatctattttcacaatattatatgcaaagaaacaagtataaaaatttagcactttacatgcacctttcctttctctttcttcgcattcgtgcgtcaaatgtagcacattatttccatacaaaaaaaataattcgcttttttttacgaacgcaacaccccgtccaaacaggcctgacggcctaccccttcacacgttataaaatataaatttcactcatatccttttattttatactataatagtaaaagagaaagccaatagactttgctcctcaaacagaaaaaacacacgagtttttaattttaaaataacattatttaatccatttacagggattccagcagaacaaaaaagataaaattcaattagtacgagctctcagaaaaaaatgaggcaaagattctatcaacgaatcgaaaagaattgtaattttgcgacaaaattcattttctacaaatatcaatatggatcatgtagtcaaaataaagaaaggacttgatattcaattagaaggaattccaagccctaaaatatctaatacaccggatagtcagctatacgccattattcccgacgattttgtaggtttgactcccaaagtaattgttaaacccggagaaaaagtcttaaccggttctccggtcatacacgataaaacgcacccgaatatcgtcgtgccctcgcctgtcagtggtgaaattgtaacaatagagcgaggagaaaggcgaaaagtcataaaaataaccattaagccggatgcctctcaacaagccttagagttcggaaggttcgatctcgaaaacatggacagctccgaaatcaaagatttattgttgaaatcgggcattttcgcctttataaaacagcggccctacgatatcgtagcgaatcccgataccgctcctcgcgacatattcgttacggcattcgactccgctcctttggcccccgattatgccttcattctcaaagaagaaaaacagcacttcgaaaccggattaaaagcgttaaataaactcacaagcggaaaagtttacgtaggtatatcacaaagacaacccatagacgtaaaaaatgctacgtctgttatattcgacggaccgcatcctgctggaaacgtaggtatacaaatcaatcatatcgctccaatcaataaaggagacacagtatggacgatgagcgctctcgacgtactcttcataggaagactattcgacaaaggcatcgccgacttttctcgcatagtcgccgttacaggctcagaaatagacgacccgcactacgtacgcacccgtataggcgcatccatcgcttctatcacacaaggtatggtaaaagcggtcgaatacgaacaacgctatatcagcggaaatgtattgacgggggttaaaaccaatgcagacggttacatcggagcgacccattctcaaataacggtaatccccgaaggaaacaattacgacgaatttttaggttgggcttctctcaatccccataaatatagcacgagtcactcttatttttcttggctattgggaaaaaagaaaaaatacaccatcgatgccagaataaggggcggagaacgagccattatcatgtcggacgaatacgaccgggttttcccgatggacatctacccggagtatcttatcaaagccattttagcattcgatatcgataaaatggaaaacttgggtatctacgaagtcgccccggaagatttcgcgctttgcgaatttgtcgatacgtcgaagctcgaattacaaaaaatcgtgcgcgacggtctcgacagacttatgaaggaaatgaactaattcagtaacaacattaatacaaaacaaccttgaaagctttaaagaattatatagacaaaatcaagccccattttgaaccgggaggaaaattgtctatgttccaatctgtgttcgaagggtttgaatcattcctttttgttcccaacaccacatcacgatccggtgttcacattcatgacagtatagactctaaacgaacgatgattgtcgttatcatcgctttattgcctgcaatgctattcggcatgtataacgtaggctatcaacattacttgtcgataggagaattggctcgtacctcattctggtcgatattcttcttcggctttttggcagttctgcccaaaatcgtcgtagcatacgtagttggattgggaatagagtttaccgccgcccaaatacggcatcatgaaatacaagaaggattcctcgtttcgggcatgctcattcccatgatcgtaccggtagatacacccttatggatgatcgccgtcgcgactgcctttgccgtaatcttcgcaaaagaggtattcggaggtacgggaatgaatattttcaatatagcgttggtaacaagggcattcctcttcttcgcttatccatcaaaaatgtccggtgacgaagtctttatccgcacgagcgatacattcggattaggagccggtcaaatagtagaaggtttttcgggggctacccctctcggacaagccgctacccattcaggagggccgctccaactaaccgatatattgggaaatccccttttcctgaatgacatgttcctcggatttatacccggttccataggagagacttcgacattagccatactcatcggtggagccatactgctaattaccgggatagccagttggagagtcatgctctctgtttttgcaggaggcattttcatgagctacatttgtaactggttcgccaaccccgacatttatccggcagcacagctttcgccggcctgtcaaatatgtttgggaggatttgcattcgccgccgtattcatggctaccgaccccgtaaccgggtcaaggactaatacaggaaaatatatattcggatttttagtcggcgtattagcgattttaatccgggtgttcaataccggataccccgaaggcgccatgctggcagtcctgctcatgaacgcttttgctcctctcatagattacttcgtagtcgaagccaacattcgccacagactcaaacgagcaaaaaacttgacaaaataaaaacagctatgaataaacaaggtaatacatacacaattatttatacctcggtcatggttattgccgtagcttttattttggcctttgcagcgataggactaaaacctgcacaggaacgaaacatcgctattgacaagatgagccaaatactcaactccgtaaacatcgcatcgactcccgagaacgctcaggagttatacggaaaatatatcgacgattcttttataatcaattcgaaaggcgaattggcaaaaggggaatctttctcgataaacattgcagatcaactgaaactgcctgaaaaccgacaaaccttgcccgtattcatctacaccgacaataacgagtctcccaaatacattatccctctttccggtagcgggctatggggacccatttggggatacatatcggtggaaaacgatggcaatacggtttatggtgcttatttcgctcatcaaggcgagaccccgggtctcggagccgaaatagaaaaacctcagtttcaagaacagtttcaagggaaacactttttcatagacggcaattttacctccatcgctgttgaaaaaacaggacaaaagccccaaaacggagccgactatgtcgatgctgtttcaggagggacaatcacaagcaaaggagtacaaaccatgcttcaaaaatgtgtaaagccttatgccaaatttttagaatcgcttaattcaaagaatatataaccatgttgtcaaaaaagaacaaagagattctcttaggccccctttccaagaataacccggttatcgtacaaatattaggtatttgctcggcattagccgtcacggctaaactcgaaccggctcttgttatggcagtatcggttaccgccgtggtcgcatttgccaatgtcatcatctcgttactgcgaaacacgatacccaacagtatccgcatcatcgttcaattagtcgtcgtcgccgcactggtaattatcgtagaccaaattctcaaagcccatatgtaccaagtgagcaaacagctctcggtgttcgtgggacttatcattaccaactgcatcctcatgggtcgtctcgaagccttcgctctgagtcataaaccgtgggagtcgttcttagacggtataggaaatggaataggatacggaatcatattagtcatagtcgcctttttcagagaactgctaggttcgggtacgctattcggatatccggtcatacctcaacaattatacgattggggctatcagaacaacggtttaatgatacttccgcctatggcccttattaccgtagcttgtatcatttgggtacaccgttctcgaaataaagatttgcaacaataagaaacagagataagataactatatatggaaaatttaaatctgttcgtcaagtctatttttatagacaatatgatatttgcctacttcctcggtatgtgttcctatttggccgtatcgaagaatgtaaaaacagcctttggactgggtatcgccgtgacctttgtactagcgattactttgccggtcaattatctgttagagacctatgttttgaaagcaggcgctttgaaatggttgggagccgaatacgctcaactcgatttgagcttcctgagcctaatcatgtttatcgctattattgcctcgatggtgcaattggtcgaaatgttcgtagaaaaatattcaccctccctatacgcctccttaggaatattcctgccgctgattgctgtaaactgcgccatattgggaggctcgctattcatgcaacaacgcaacttcccctctgttacgagcgcgaccgtttacgggataggttctggaataggctggatgctcgccatcgtatgcttagcggccattcgagaaaaattaagttattcaaacataccggctccattgcgaggtataggtatcacatttatcattacaggactaatgggtatcgccttcatgagctttttaggaattaaactttaaaacgatgttattagaaataagttcaatgacaagtactatcatatcgagtatcgttttattcttgggtgtatcgatacttttagtcgtgatactgctcgttgcaaaaaaatatcttgtcccgtcggggaaagcgacaatcaccatcaataacgacaagcaaatcgaagtcgaaacagggagcagtttactgagcacgctatctaatgaaaaaatattcctgccgtcggcgtgcggaggcggaggctcatgtgcccaatgccgttgtcaggtattggaaggcgggggagaaattttaccgacagaacaagtacacttctcccggaaacaacaactgaaccattggcggctgggctgtcaggtaaaagtaaaaaacgacatgaaaataatcgttcccgaatcggtattaggtgtaaaagaatgggaatgtgaagtgatttcaaataaaaacgtagcgactttcatcaaggaatttatcgttgccctgccacccggagaacacatgaattttattccgggttcttatgctcaaatcaaaattcccacttacacgatggactatgacaaagatatcgataaaagcctcatcggagatgaatacttgccttcatgggaaaaattcgggttattcggattgaaatgtaaaaacacggaacctacgattcgcgcctattctatggcgaactatccggcagaaggagatcgaatcatgttgacggtgcgtattgccacgccaccgttcaaaccgaaaccgcaggtgggcttccaagatgtgatgccgggtatcgcctcgtcatatatctttacgctgaaaccgggcgacaaagttatcatgagcggcccttacggcgatttccaccccatattcgactccaaaaacgaaatgatgtggataggcggaggtgcaggtatggctccattgcggtcacaaatcatgcacatgaccaagacgcttcatacgaccgaccggaagatgtcttatttctatggagcccgagcattaaacgaagtattctacctacaaaatttcttggatctggaaaaagagttccccaacttctctttccatttggcactcgaccgccccgatcccgcagccgatgcggcaggagttaaatacactccgggattcgttcatcaagttatatacaatacctatctgaaagaccatgaggccccggaagatatagaatattacatgtgtggcccgggtccgatgtccaaagccgtagaaaaaatgctatgggatttgggtgtaccggaagaaaatctgatgtacgacaacttcggagggtaataaatcacccgacagatattgaaaagcaggcagaaaaatcgatcgattttcctgcctgctttttatcgtataatcaccagatagacgcataaacgactcgctcccaccttctgcgcggctggcatgaaaaacgaagtcggtaacaaaaagggaattcaccccctacaccccaatcaatcaaaatgtcatggaagcatacaccccgaaagaattcccatcggtaagaggcgatataaccaacctatggttttgagcgaacggacgagtataaatatatgcacaaccggctcctataacagctcccgccgccacatcccaccaatcgtgcttccgtccatacacacgactccaacccacatacgaagctaacacataggcgggagcaccccatttccaaccatatctgcgttgaacaaaagcagcattggcaaacagaagagaagtatgggccgaagggaaagaatatcgattgctatgatcgggacgatccttctttaccgtaaatttcagcaaataagaaacaccgagtgtcgtcacacccgtaaaaagcccctgcttggccccggtccagtccttcatagccaaaacagtggcaaccgtagccacgggcatagcagccaacaatacatcgcccgacaccttaacagcttttcgttcccgactcaaaccctctgccccagcaggaaacacaaataaaaggagcgaacatatatacacgacaattcgacgaaacatactcaataaaagagagataatatcttaggaacaaaaatcaacaaacctacaattatcgacatgacagccaatatcaacacggctcccgccgccaagtccttcgtatgcttgatagcttcgtcgtactcgggcgacactttatcgcataatgcctcgatagccgaattgacaccctcggctgccagcacggctccgatacatagaattacagcgatccactcgaaagtcgagaggcccaatagccccccggctacaatcacacacacggtcaccgcacagtgtatccatgcattatgttccctgctgacaagccgaactacgccccgccccgcatacttgaaactataaatcctatccttgatactgaatcttttattttccatcgaatcacaccgttacatgtacagactattgtcatacctgaatacaaagataaaacagatttatgaatttaagatccgtttcaataaaatcgggaaacaacctatataaactattgtgccccgatttgacaaccggggcacaaacatataattgaaaaaaatcaattatttcttacgattaccataacggctcatgaacttatctacacgaccggccgtatccaccaatttctgtttaccggtgaagaacgggtgtgaagaactggtaatttcaagttttaccaaaggataagtaacaccatcaatttcgatagtctctttggctgctacggttgaacgagtgataaagatttcttcgttcgacatgtctttgaaaactacgggacggtagttatcaggatggattccttttttcattgttatatcgtctttttaattattatcaaatgttcacgttggtagcgtgatttttcgtaatggcttgcaaatgtagggataacttttcatttagaaaaatatttattccactttttcataaaaaagccggccggcgacaaagatgcgccgaccgaactatgttttaattctgtaatctgccgattattcgaactcgatcaacggttcgttagtacccactacatcgttttcttttaccagaatacgtttcacggttccttcaagggtggagagtatatcgttctccatcttcatggcctcgtacaccagcacgacatcgtcttttttcactttgtctccaaccttcacttttatctcgacaaccttccctcccataggagcatcgatagtcgggcccgttataggttctacgggagctgcttcctctgcggcttctttcacttcctcgacagccggtttcttagcctcatactcagctgcccgcacacccttcaaataagtggtagcaacgttggggaaaagttcgagcagcaaatactcctgttcgttttcggccaatttcacattgccatactccggcaaaacaggattttcgggagccttgtaagagttcgtatcatacggagtctcaatcggactgccggtaatcttttcacggaatttaggatcgacagggaccggagtcttgccatattctcccttcaccaatgccttgaactggttggaaaccgtcgtatattccggattccctttcaatttatccaaagcacagcttacggcttggcttcctacaatctggctggtaggcgtaaccaaaggaaccaatcctgcatcagaacgaaccttcggaatcaatcgcatggcatcatcgagcacatgctcggctttaagctgcttcaactgagccaccatattggaatacataccgccgggaacctccgcagccttcaccaactcattcggtttcgggaatccaaaataatcttcgatagcatgacaagcatccaacaaagcggcttcgttattctgacgcgcggcttcgatagccgtatcgaacaacttgtcgatatgatcgggcaacttatcgatcaacggatcaaacgcaatggggaacgagtctttcttcaagtcgtatgcagccagctcgcgacgaataccgagcaactcggcacgtattttacttacggctgccatattgacttccatctctacgcccaatttattacagaaaatatagagcaattctatggccggagccgccgaacctccgccaaaataccaaatattagtatccaaaatatccacaccgtgtataacagccatcaacgacgatgcgaggccataccccggtgtacaatgggtatgaaaatcgaccggcactttcaaagactgtttcaatttaggcatcaaagaagcgattcgagaaggattcaccaatccggccatatctttgagagtaaccatctttgcacccaacttttcaaaaccgagtgctttttccacaaaatattcatcggtaaagataggtttcggcaattttttaccgaacaacgcctttactcgatccataaacgttatggtataatgcggatctaccgtgtaacatacggctccatcggaaatcgccccgacagcatttatcttttccacagaagattttacattgttcaaatcgttgagtgcatcgaatatacgcatgatacccaacccgtttgccacggcctcgcgataaaatccgtcgagaaccgtatcgggataaggcgcatacccgaacaaattacggccacgagaaagtgccgttaaataagatgctcccccaatagcttcactgattgttttaagacgagtccacggactctcgttcaaataacgcatcaccgaatcgggcacagcaccaccccaaacttccatcgcaaagaaaccggcatccttgtaataaggtaaaacgcggtttatctgttcttgggtaagacgagtcgcaaacaaagactgttgcccgtcacgaagagtaagatctcggattttcaattttcttgacatagccatttgattttataggtgttacatctattcacattacacgaatttaagaatacaaaaataatattctttaacttattatcaaaggaaaaagcgtacttttgtatcacaaataaaatctttacgccattcagatatgtttaatttctttaaaaagaaaaacaatactcccaaactaccctatacgacagaggttcactgccatgtattaccgggtatcgacgacgggtctcccgatgtagaacactccctcgccctcattcatcaaatgaaagaatggggacttgaacgaatcatagctacgcctcatgtgaccgaggcttcattcgaaaacactccacaaaccatcgggtcggcatactcccggctttgccaagagaccaatttggacgaactgggaattaaactctgctactccgcagaataccgaatggacgataactttttgggcatactgcaaagagaagaaatcatacccatgccgggcaaccatatccttatcgaaaactcttttctacaaccgttctggaacatcaaaagtctcgtcttcgatttgcagatcaaaggactttcccccattctagcccaccccgaacgatatgcttattattacgatgacaaaaaaatctacaaagaactgcatgaacaagggtgtgaatttcaagtcaatttgctttccctcgcagggtattacaacaaaagagcgaaagaggtggccgaatggctgatttccaaacagatggtagactatctgggaagcgatttgcacaacagttcccatgttctgcacatcaacaaatatttatccgggaaagaatatcccaagcacatgagaaatatccacataaaaaacaaccacttgtaaaataaaaattatttcaatttcaacggcatgttcggtgtaatgatagtcatgttatccggtattctgatcggatatatattacggaatattcgagccatacccgccctcgtttccaaaatcaacatttacattattttcctgttacttttcgtgatgggtctatcggtaggtagcaacccgcaagttatacaagggctgggaaccctcggcctcttaggtatcgcaatctccgttgtatccatcgcagggagcgtatttttatcatggatcgtttaccgtcacctattcaaaaaagaagatgaccaacgatcatgaaaaatagcctcatcattctgttatgttttgcggcgggagtactctgttcctactggggcataattcccgagtgcgacgactccctcagcctctatatcctgtacgtcatgatgttcttggtgggaataggactcggcagtgatttaaccgcactatccgctcccatcaaaaaatataaattccagattttgttgataccgttatccacgatcgtcgggacaatcgccgcttgttgtctgttctcgctattctgtcccgttccgttacgagaaaccgttgccatcggttgcggattcggatattacagtctatcggcaattttactgaacgagcttgcaggagccgacatcggtactatcgctcttatttgtaatctgagcagagagcttttgacacttcttacaattccgctacttgcccgttattgcgggaaattagccccgattacagccgcaggagcaacctccatcgacacgactctacctctcatcagcgccaccctcggagaaaaatacgtcatcttcgccatctttcacggcatcatcgtcgatatttcggttcccgtcctcatctggctattatacctgtaattgcccccgacatacagaactacacgggtatctgtcaaaacgaccaaaacggtgcaaaaatcaatcgaatataccctctatgctctccacgggagctgtaacggattcttcgatatatgaacttccgctacaaggatcggaatactcctcaggaatctcgaagtcgctatcttgtgagtaacccagactttgatccccataaactttctgcatataaagaccataaataggcaatgccatactggctccctgcccatcggccataccatcgaagtgaatcgagcgatcctcgcctcctacccatacaccagaaactaaatcgggagtaaatcccataaaccaaccgtccgaattattattggtcgtccctgttttacctcccataggagcagtaataccataacggaaacgaacacgaccgcccgttccgtgatctatcacatctttcaacatcggcaaaatgcgataataagcctgttcactgaaaacctcggtcatcgaaggcgtaaactcggctattacattccctaaattatcctctatacgagtcacatacaaagggtctacacgcacgcctttgttcgaaaaggcggtataagccgtcaccatttcctcgaccgagacctcgaccggacctaaacaaagagagatgacttcatctatcttatttttaatcccgaacgaatgcatcaacctcgccaatgacgagggcgacaacttatccatcaatcgagcagaaatccagttattcgaatttgccaacccccaacgcaaagaaaccatctcgcccacacgcgctttcgacgaattccgaggagaccagggcttcccgtcttctgtaatcaatgtaggctgttcatttaaaaacatatcgcaaggagtgaattcctcctccatcgccaacgtatataagaacggtttcacggtcgatcctatctggcgccgtcccaccgaagccatatcatattggaaatgcgtaaaatcaggaccgcccacataagccttcacatgacctgtattcggatccatagacataaatcccactcgcaagaaagacttctgataacggatagaatccaatggagacataatcgtgtcgatcgaaccttgatacgaaaagacctgcatctcgacaggagtaataaatgcctttcgaatctgttcgtcgctcgcacccgacgctttcatcgcccgataacgatccgactgcttcatcgccctatccaagattgactcccgctcttcccgagttatgcttcgggagaacggtgcataactccgtccttttttctcggcgaagaagcgaggttgtaaatacccgcccaaatgtttttccacagcctcctcggcataccgttgcatctgcgcatcgagcgtcgtatagattttcaacccatcggtataaatattatacttggttccgtcagccttcacatttttctcgcaccaaccatacaacggattattcgcccaagcaatggaatcgtctataaatttttgagcttcccacccccgatattccgatttcacaggcttttttgccgtcatcatcaatctcaattgctctctgaaataaggagccaacccctctttatgatccacccgggtatatttcagctccaaaggcaaagcttgtaaagagtcaagttccgcctttgtaatatacttggccttatacatttggttcaaaaccgtgttacgacgccccctcgtgcgttcgttaaacctgcggggattataatacgagggattcttgcacatacccaccaacgtcgcagcctcctctattttcaacttatcgggagtcgtatgaaaataaatgtatgccgccgattgtatcccgactgcattattcaggaaatcgaaatgattcagatacatattcacgatttcctctttggtataaaaacgttcgagctgtacagctataacccattcctgcggcttctggaacaaccgttccaccacattatcggcattaggagaataaaggagtttggccaactgttgggtaatcgtacttcctccccccgcactcttttgaaataatagccctcgtttgataaaagcccggaacaaagccttcacatctatgccggaatggtccttgaaacgaatgtcctccgtagcgataagagcattgaccaaataaggagaaatttcatcataatgtacatacacccggttactcttgctttgataaaaccggcctattacttccatatcggaagaataaatctccgaggcgaatttatctttcggattttccatatcctctatcggcggcatatatcctatccacccccatgcaatcatcgcaaaggccgcaacgacaagaacaacgattcccccaaaggcataccacatataccgcacaatacgcgatgtatccccgatagattttttcaacttacccactttcatctctccatctatgcatttattaacaaagtcttaaaagccattcgctctatccgcagccaattgttaaagcaaaggtaacaaatatattttatccgaatacattttgtagatttataaagaatattttttatgtctgaacacttggctttcggtctttttttactatctttgcttagtgaaatgagtgggcaagaacaaacatataatccattacggcacaggcatttttataaaagccaagaaatatattctcttgaagagaaacaaaataaaaagccaatatgacttttatagtcgtgttggcttttttgttaacgagcattgtaatataaaaacaaatcataccgacgatgaaacgtgagagtttagtatctattaccgatttttcaaaagaagaaattctggatcttctcgaaaaagcgcgtcgattcgaagaaaatcccaatcgaaaaattctggaaggtaaagtcgtggcgactctgttcttcgagccttctacccgcactcgactcagctttgaaaccgctgtcaaccgattaggcggaaaagtcattggattttcagacgccagcacgaccagctcctcaaaaggagaaacactgaaagacaccatcatgatggtaagcaactatgtcgacttaatcatcatgcgccaccatctcgaaggtgctgcccgttatgcctctgaaatttcttccgttcccgttatcaatgcaggagacggagcgaatcagcacccctcgcaaaccatgctcgatttatattccatctacaagacacagggcactctatcgaacctgaacattactatggtgggagatttaaaatacggacgtaccgtacactccctgctgatggctatgtctcatttcaatcccacatttcatttcgtcgcacccgatgaactgaaaatgcctatcgagtataaactcttctgtgaacaaaatcatattccctacttcgaacacaccgaattttccgaagaggtaatcaatcaagcggatattctatacatgacccgggttcaacgcgaacgattcaccgacctcatggaatacgaaaaagttaaaaacgtatatacgctgcacaacagtatgctcgaacacagcaaagctaatctgagaatcttacacccgctcccccgggttaatgaaatttcttacgatgtcgacagcaatcccaaagcctattatttccaacaagccaaaaatggactattcgctcggcaagccattatctgtaaagttttaggaattgaagtttaaccccttttattttcggtaatcatgaacgacgaaaaaaaagaactaaaagtagcggctctcgaaaacggaaccgtcatcgaccatataccttcgagccaattattcaaagtagtgtctatcttaggacttgaaaactgtacgaacagcatcaccatcggcaataacttagccagtaaaaaaatagggaaaaaaggtatcatcaaagttgccgaccgtttcttcaaagaagaagacttgaataagatcgcattggtagccccggctgcacaaatcaatattatccgcgattaccaagtcatcgaaaaacggaaagtatctttaccggacatcgtgcatggcattatccgctgcggaaatcccaaatgcatcacgaataacgaaccgatggaaaccatatttcatgtgaccgacaaaatcgatgtccaagtaaaatgccattattgcgagcggtcggtaaccaaagaagaaatagaaatctgttaattcttccgatatatgaaacaaagttggaaacccgggactaccatctacccgttgccggctgttctggtcagttgcggtaatacgcccgaagagtataacctcattacggtaagttgggtcggcacgctctgtaccaatcctcccatgtgctacatatccgttcgaccggaaagatattcctacgagattctaagaaaaaacatggagttcgtaatcaatctcacgaccgttcaaatggcaaaagtgaccgattggtgcggcgtttcctccggaaagaattataacaaattcgaaaaaacaggactcactccgaaaaccgctcaaatcgtaaaagctccctacgtcgaggaatctcccctctgtatagaatgtaaggtaagagaaattatcagcctcgggtcccacgatatgttcatatccgacgtagtaaacatattggccgatgataaatatataaatcccgagacaggcgcgttcgatatgcaaaaggccgatctattggtctattcccacgggcattactacgaaataggaaaagaaatagggaaattcggttggtctgtccaaaagaaaaaataaatagacaggtatgaagagaatcactacggttatctgcatggcactcttatggattcttacagttcaagctcaaatacaagaattgaacgtaagcaagcgattcaattggggaatccgcttgggagtcaatgcgccgttagtcgacataagacatttgaccctgaacggaaacaaagtcgacgaatccgattccgaatcgaggctgggattatccggctcttttataggaagatacaatttcaaaaaacattatatacaactcgaagtgggcatgcatcagttccatacccggctatataatcccgactacgaattacgtaaaatcaatacttcggcttataccctcgatgttcccatactatatggctataacatcaccaaacatggcccatacctcatgaatctttttgctggtccccgggtttcctacatctttaacgaaacaagcggaataagcactacgggaggttcattccgcaacctaatctacgatgaatcccctaacagcttttcattctatttgatcggcggattgagcaccaccatagggcatctatacatcgactttcggtatgcctattgtgtgggaaattccaaagatttatctttcaaagtcaatcccgatgagctccaaaccagtcaggtaaaactgtccagagccgtcaacgaattgagcatttcaataggatatttatggtaaaaacttttaatacacaacacaatatgaaaagagacgacattattttcgacatcattgaaaaagagaatcaacgacaacgaaaaggcattgaattgattgcttcggaaaactttgtcagcgatcaggtcatgcaggcaatgggttcttgcctgaccaacaaatacgccgaagggtatcccgggaaacgctactacggaggttgcgaagtggtagaccaaagcgaacaagtcgctatcgaccgtatcaagaaactgttcaatgccgaatgggcgaatgttcaaccgcattcgggagcacaagcaaacatggccgtattcatggccgtgttgaaccccggtgacaaattcttggggctgaacctttcacatggaggccacctttcgcacggaagccccgtaaatttctccggactgatgttccacccgttggagtacagtgtgaaagaagataccggatacgtcgattatgacatgatggaagaggtagccttgcgcgaacgtccgaaactgattatcggcggagcctcggcttactctcgcgaatgggactatgcccgcatgcgcaaaatagccgatgaaataggtgccatttttatggttgatatggctcaccccgccgggctcatagccgccggattgttggacaatcctttgaaatacgctcacatcgtcacctcgaccactcataaaaccctgcgcgggccccgtggaggtattatcctcatgggtaaagattttgaaaacccctggggtaaaaaaacacctaagggagaaatcaagaaaatgtcagcattactcgattcggcagtctttccgggagtacaaggtggtccgcttgaacacgttatcgcagccaaagctgtatcgttcggcgaagccctgcaacccgaatacatcgaataccagactcaggtgaagaaaaatgccgctgctatggcaaaagcattcatggataaaggatacaaaatcatatccaacggtactgacaaccactgcatgctcatcgacttgcgtaccaaattccccgaattgacaggaaaagtcgccgagaaagcattggttcaagccgacatcacggtgaataaaaacatggttccgttcgatagccgctctccgttccaaacatcgggtatccgtgtgggaactccggcgataacgactcgtggagcaaaagaagaaatgatgtgcgaaatcgtagaacttatcgacacggttttggccaatccagaaagtgaagccgtcatcaaagccgttcgggaaaaggtcaacggcatgatgaaagaataccccatctttgcttattaacaccgtttattcatttcaagaacactccgaatggagtgttcttacttcattttaaataccatgaaacttctatcgaaactttctttaccattcatattctttacagcaatactgactcttgaatgcgcagcgcaagattggcccaatctgaatcgttatcgcgatgccaacaaagctattatggaaatgaggaaaaacgactcggaagatgcccgtaaaaattgggttgtcttcatgggtaattcaattacacaaaattgggcttctctggatccgcaattcttttccgaaaatgactacatcggaagaggaatcagcggacaaaccagctctcaaatgcttctgcgattccgacaagacgtgatacatctggttcccaaagcagtcgtcatattggccgggacaaacgacatagccgggaataccggcccgacgaatatcgatatgatcatggacaatatcaaatccatgacagaactggcacaagccaaccatataaaagtcgtcttatgttccgtactccctgccaatcgatacggctggtctcccgaagtccaaccggcagatacgattattgccttgaacgaactcattaaagattacgcccgctcgaaacgattggtttacgtcgatttttataccgcccttgtcgatgaacaaaaagggttaaaccccaattacggcagggatagcgtccaccccaacctcgacggatacaaagttatggaaccattggttgttaaaggaatcaaacgagcgttatcccgcccataggtcgccatctccaagcgatttccataaaaaggctcgaatttttcgagcctttttctttttatcatttgattccgtatttctttaatatcctcataatctgaggttggtattgctctaccatacgatcgaatcccaagtcgttagggtgagtaccgtccaccgaaccttcatgatctgtcccgatggcatgattgtcccgaatcaaatacaggtcttttataccttgtttctttaacagttcatactgtttcacaaatgcctcgccttgacgggtacaacgatcgtgcacagcttggtcactgtatccgttttccctcatataagtctctatcatgataataggagttccctgatgatatttccgaatcgtgttcaccaaatattgagtacgctccgtgatttccttaggagaaggattcggcatacaatccaaaataaaagcatcggcatcgatatctttcaacatatcggccaccgcagcctccattttaccgtttccgctcaaaccgtaattcacgaaattgatacccgtatttctcgacattcgcgcagggtacgccagccccgaacgactggcacaagccccatgcaagatactcgatccatacataagaaccgtatgacggaacggagacggctctgcctcgataaaagacccctcgtctactccgatttccaacgaacgtacctcttcgaacaacggaagatataacaaaaacctatgtacccccggctttaaattcttggtgatgacccgctcttgctccgcttttcctgccgacggagtgcctgcgcccaccggtatccattttccgccgtcattcatatacaaatccaatcctctatcgcatatcggcgtaacgtttcccatcacaccttttcccttcgttgtccaacgagcggcaaccgtcgggctattggtcttaaaactaacgaccaatccggccgaatgcgtaaacaaccgctttacttgaaacggcatatcgttatacttcaccgtatcgacccggtgatagacattttcgggagtcggcatcactttcccgatgagcgtcaaacgagacgcatctacatacttcaattccgcatttattggcaaaataaaagccgaaatcatacacaaagcggcaattaaatttctatgttccatggatatgattataaattagttattgattacactacatcgggtctacatcataatagagcaacaaagtcttaaaccggtcgtccaccaacatattttcatagacctgtttcaaaatctcctttactttcggcatcgatgccgaaagttccattttcaagacgaccttccgtatatataaagactgaatacgagccacaggcggattatcggggcctaacacacgtgcgccgaatacctctctcaacagagatgtatatcgtaccgacaactcctgcaaaagagtctcgtccctatgtttcagataaatatatatcaaccgggtataaggtggataagaaaaagcctttcgctcggataactgcatgttatacataccctcgtaatcatgagcgattacctgacgtatcagaggagattccggctgagaagtctgtaatacgaccacgcccttccgatttttccgaccggctcgtcccgaaacttgctccatcatctggaaagctcgctcatgggctctgaaatcgggataattcatcatcaagtcggcactcaatatccccaccacgctcacatggtcgaagtccaatcccttcgtaatcatttgcgtgccgataaggattttattctttttctttgaaaaatcttcgatgatctgctcataagcactacgggaacgggtcgtgtccaaatccatacgagataccggtatattcgggaaatgttgagcaatatcctcctctatccgttccgttccgaaacccatcaccccgatcgtaggctgtccgcaagccggacacactttcggtatctcatacgtaaaaccgcagtaatggcacgtcagctgattaaaacgcttatgataagtcagactcacatcgcaatgttcgcacttgggaacccatgcacactgtttacattccaccatgggcgcgaatccccgccgattttgaaacaaaataacttgctcgtccccgtccaaagcaatctgcatgcgattgagcaattcaggtgtaaaattccctcgcatacggttctttttcctcatctcccgcacatctaccgggataatttcgggtaactccacatcgttaaatcgactcttcaattctaccagaccatatttcccctgcctcgcattgaaataagtttcgacagccggggtagccgttcccaacaaagtcttagccccatgcatcgacgccaaaacgatcgccgcattacgagcatgataacggggagccgggtcgtactgcttatacgaagtttcatgctcctcgtcgacaattaccaatcccaaatcgccgaacggcaaaaaaatggaagaccgcacacccaaaacgattcggggagaatggtcgtcgagcaatgtattccaaatctccacccgctcgttatccgagaacttcgaatgataaatcatcaatttatccccgaaaattttgcgtaaacgattcgtcaactgtgtcgtcaatgctatttcgggaaccaagtataatacctgcctgccttcgtgcagaacacggtctatcaaatgagcataaatctctgttttcccgctcgatgtgactccatgcaacaacgtgacggaatgctctttaaatgaatcagatatttgccgatatgcaacttgttgggcatcgctcaacggagcagcctcttgaacagtataaacctctgcctcgaaacgacttatctctttcttatacggttcgaacagccccttctcgaccatagcacccaaaaccgccgaagacattcccgaacgatcgagtaagctcttccgggaaacctctctcagttttcccttttgcataaacaaagataaatcgagaaacgacagtagcatcgtctcctgcttcttggcttgcttcacgcattcaaacgcatggcgcaaagccgcatcatcgccttgttggaacgtcaaacgaatataagtttccgttttcggacggtagttcgtcttcaactgttcggagacaaaaacagcctctcgttcgagcaacacccgcaaagtaggtaaaatattgcgcattccgctctccttttcgagttcctgcacggtcatgcgtgacttcttgcccaatgccgccaacagcatccattcgcgctctttcaaacgattatcgtccggttcctcgaaatccgtattcaacgtgaccgtcgtttcactttcgagtttcaatcccgaaggcaacgctgctttatacacatcgccgaccgaacagagataataatcggcgatccattcccagaactgtaattggggacggcgcaaaacaggacgctcgtcaagcaccgaaataagctctttcacctcgtatccctgtggcatgacatcgtgcaaccgaactacaatagccgtataatactttttcctgccgaaaggaaccacgacccgactgccaatttgcaaagcctcctgcaaatcggaaggaatccgatacgtaaaatatttatataacggcagcggtaatacaacgtcggcaagtgtgctcatatcaagtcctgttctttccaagagaaatcgaaaataccctctctctttcatgcaaagatagcgaaaggtgagagcagaggcaaatggaaatttcatttccgacttgaccatgccgaaccgaaccctatctccatagtgacaaagatacatataagcaagagcagagcaaaacaaagctcgctttaattttattctgccgagcggaggtatcttcgagtttcaactcaaagatagcgaaaagagagtgcaaagacaaacggaaatcatatttccgacttgactatgccgaaccgtatctatataaatatagtgaaagtcaaaggtagaaacgggtttattcgggcacagtaggaaatcagtgagatttgtccctttaccccccctacactccacggcattgcaagacattcacacactcctccctagccgtgtctcgtagccttacgggggttgcaacgcaaagtatagagcaaggtagcacagccggagagtaaaaacagtagaaccatgttatcgaaagatttctacactcctcccctgcgttttgcaacgcaaaatatagaggaggtggcacgtagtgacggaggggttaaaaaatatccgcaacagagaaaacgtatcaaggtatcaaccctctcccacgatgtgccgtaaggaaatataggagaagtcctcacaaaacaaaaaggccgttcaaagtgacgcttttaccctctccctctgctcatcgcagatgagatagggggagtgcccgtagggcgagggggtaaaaaaacaggggagaagagtaaaatctatccttatgcaaaaacgagaaataccacctttaacctctccccgccgtaccccgcagcattgcagggtatcgcgaagcgatacagaggtcttccgttaaccgcatagggaaaacgaataaatacgagggaggtattaccccctcctcctctgtgttttgcaatgcaaaatataggggaggtggcacgaagtgacggaggggttaacccttacagcaaaaaaacttatgaaatcttttcaacccctctcctcagaaactaccgtttcatcagttcccccctgatctcctattgagccaatatcccaccaattataagccaaaccgaagattccggttaagatacttctttcacattattccacaatcatacgcttagaatcgacgagcgtcccatcgatcaccaaagcatagagatacattccggcggttaagtccgaggccggaatcacaatcttccccgttggcatatcgggttgcagcgtataggatttcaactgcttgcccgtcaagtcacaaatacatatcgatgccgatcgagcattggtcgagagcctatatataatttcggtagtctggaaaaaaggattgggtacgttttgatagatcgcagcctctccggtggaagattcgatttcgctatcctccgaatcgcgggcgttcttcggcacgactttttccggaacattgtctcccgataacgactcttccagttcggcaatccgttcctcctgtctttcgatagtcgcttgcatctccttcataccttccaccagtaaaggtatcaaatcggtatacatgacggtcttcgtcccgtccggcaaagttcgtaccacttccggcactacgctctccacctcctgcgcaatgaaccctatgcgttccctggcattctccgcctcgatctgtctcttgatatcggacgaagcatatccagcgtggccgttctcattcgccacagccgataccggccgctccccacccggtttatagcggaaactcactcctcgcaaagccgagattctgtccatgcccgaggctatctccttgacatcttgtttcagccgtccgtccgaggcttgcgtaaatccgctcagtccgtataccagcccgtttccatcgaccgaaaacacctgcatggaagtccggtacgaatccggagtggtcgtcataatatatgcggcgaacggcctatctgcatttttgtagacatcggatcgtatcccctcatgagtccctccttccgcacctgtatagatggaatggatcgatcggcttcctccgctccgcaccgtcaatgcggcatcgtaatgttggggatatatagactcataaggaggatcaaatccatagtcgacttccgtattaaaaatattagacccggcctccgccgcctccaaaaagaatttacccaaacttgtcatcttcaatccgccgaatccatcgctccaataaaagtcaccctctttaccgaacaatgattggcgaagggatccttcttcaccgaacaacttcaattctttatggataatcgtacggccaagactatccacctccagctgtgcccaaaccgaaatctggcacagccatgtcaccaaagacaataaaatcaccctgttcttcatagttcttgttttcgctttatgctttttaacttactctttatcatattctcccagacaaagcacgtaacatcactttctccaccttgccggcacattccaccacataaaatcccgcaggcagcaccacttccatacggctacctgtggcctcgacagtcttcactttgtgaccggtcgtgtcatagacggcaaccggcatccccggcgagaggttttcaagaactatcgatccacccgaggcataaatgcgcacgctaccctcggccgatatctcctctattcccgagaagtcggtcgctattatatcgaagttctgccataccggggcattccggtaggcctccaccgagccctcggccacatacagtttacaatctctctgccctatgccgaggaagcaatcggtctcacaaatgggcggaactgcggctttacacgtgatttccgtcagacccgtacagccgctgaatgcctcttgaccgatactcgacacactcccggggagcattaccgaaactatattttccagatctaaaaaagtggctgttgatatggaaactgtaccatctcgaactttcaagtgtgtatcataaggagccaatcccttataatcacacaatatatcattaatgtaaatcaatccatctggctgggcagaataccacggagtaaacaaaaatgcatttgttcctattttcttcacgctggttggaatatccattgatgtcaataacttgcagtacataaatgcctcactacctataatagtgactccatcttcaatcgttatcgaagttaaccctccactataaaaggcattggcgcctatctcgaccacactgcccggtatcgtcactgatttcaaatcataacaatgagcaaaggcccattctcctatcgaggtaacacttttcggtatcgttaaagaggtcatacgattagagcttcttgcaaaggcatcgctcgatatagcgacagtgccctttcgtatatcaatatgagtatcggaaggcatttctcctttataggtgtacaatatatcattgatgtacattaccccgtcaggttggttgttataccaaggagtaccgtcaaaagctcgaaaacctatattcttgacacttttaggtatggacaatgaaactaaactttcacatctcataaacactcctcgtccaatcgtggttaaactctccggtagtgaaattgaagttaggtttatacaacgatcaaacgcttcattttcaattatctttacaccatagcctatctcgaccgatgtcaatccgacacaatctttaaaagcgtaaacccctatcttgtcaacactacccggtatggttacagaagctaattcgctacaataacgaaaagcgccatcagatatttgggttgtcccatctcggatatctatgtgtgtttggggaggcattttacccttatacgcatagaatatcgtattaaaataaatttctccattaggttggttattataccaaggagtaccaccaaaggcagagccacctatgtattttatcccgattggtatattcacagtcattagcgacgtgcatccactaaaagcagaactgcctatataagaaagactttcaggtaaaattatctcggttaaaccttcgcatcccccaaaagcaccggatccgatcgtagtacaacttcccggtatttcaatggaagacaaagatgaacaaccccgaaatgcaaaatcgcctatctcagtaattcgatagtatttattcgcaaactctaccgtttcaggtatcactacaacacccgaataagaaggctgataaccaacatcaaatggattatctctataagttacaaacacttcaaaaggaatcgtaccattgaaattgtaatagataccatctttctcgaagtcataggctctcgactgaaaggcaacaaagagaagcattagcaatatctctatttttttaatgtcgtattttacaaacttcatcatatctattttttaggttgtacttcaaattttgtacccggttttatggtcgtcccacggtcgagaatcaccttctctctgccggtcaaggtaacttcgccattgttattttatccacactttctttccgttccgtatgtagaggccacgctcgggtgtgcccgtcacccgacggccttgaaggtcatacaaaggcgattggggttcgtccaattcctcatcgacccgtatctcctctattcccgagaagtcggtcgctattatatcgaagtcctgccataccggggcattccggtaggcctccaccgagccctcgggcacatacagtttacaatctctctgctctacgccggagaaacaatcggcatcgcaaacaggtggaaccgcagctttacacgtgatttccgtcagacccgtgcagccgctgaatgcctcttgaccgatactcgacacactcccggggagagttatcgaatacaaaagcggactattgccaaaagcatagtcgtctatcccggtcacccgataagtatctccttcatgttcaaccgattccggtattgccacagtaccccaatacgttcccgtgggattgggattactgtaacaggctactttcacttccgaatcggacgtaaagctgatggaataatacagtcctttgttccaaaaatcatggtataccaaatacctctctaaggaagtatccgacagggcttcttcacgagtttgtgaaaatatttgcgtttcattttcctcgaaaagcccaagatacttatcaactccccgttcccattgattgggattcaagtaacgcaatagaggatctccctccgaacaaagacaccctattccctccacgattttcaatccgttactgagtataaaaagttttcgtatcttcccatcatcgaaggctattttacggatttcggacacccatacatcgtcatatccctccacgtgtccatacttgtttcccaccttcatgttgaagtcataaagcaccaactctcctccatctgtctttttataagggatataatcgacatatgcctttgtacaataatttttataatcctcataatccaccaatatgcgaccgttctcctccctaatctttctcaaaagcgtatccggtcgataaaagtctgtctgtctttgtaatccgtgcgactcacattggtccaacatataaaagagtttaaaataaatttttccatttacctcttccggatctcccacatcataccatctacccttccaatgagcctccatatcctctaatctccaatgcggattcctctcgaataaattatccgcttggacatacactcccccaataaaagacaagagcacgatgattatattcttcgatttcataactgtcatttttttatttgtatcttaaatgtggttcctcgcttaacggtcgttccacggtcgagaatcaccttctctctgccggtcaaggtaacttcgcctttatcgaagacggcttctcctttcgctttctcgtccgtgacatgactgccaaccttgatggtatcagctttgtaatatttagggccttgtacagtctcgttctgaatataaagtacatcgggatataccggaaaatcgattgcgggaaccttattctgtccggacacgcagacccgcacataacgggcatcgcccgaatattccgccgaacggccggtataaaaccgaatttcttctgtccgctcgtcgtaaaaggcgatatcgcccgcctccgaacctaaatcgacccgaaccccgagactgtcgcgggtcaccgaaaacttctcaaactccgtaggagtatcggtatatatgcgcatgccggggtcgccgaagcaatgaaatatctccttagaaaactgtgtatagatgtgtccccgatacgccccccaagtttcctccatacgcctcaaaccttgatccaaaatttctcccaatcgggtggtttcccacaatcgagagggagaagttgtcatatgcaaaaagttatatagtttagaatccactcccggatcgggccagatggcatcgaacatgcctatcaccatcgcatcgttatagcccggccaacttttctctgttgccgcatagaccgctatggctcccccgttccgcttctgcaagaacgcctccgcaaaacaatcgtcttcttggaagctgcctgtctcgcaattgatactaaaaataaccggcaaacggtcgccattagcgagtgagaggatattatctcctgtaaaataaggttgtacccaagtagaatccgtaccatgcccccgatacaagacatagaatgccccctcgtcgatatacctcactatatctgccgaatcaccatcccatgcgaaataaggtctttgtaattccactggtatggaatccccccaagcaaattctccattgttccaaaatgtcggaggcggatagtcatccgtttctctataatcataagcaaaatagacccgattgaccgctttccctttggatagcatatagtttctaacttcctccgaagtcaatgtaaatcgtttatcctcgataccgtcccccggaccgttccaaccatatggcgtacaatcctcaaaataggcgcaatgcagtcccgtatcatagaaagcggtgtctcgcaccggattccgctcgtatcggataatcttgtcgaccaccgtcatcgcctccgtcgccgtggagaccggcaatcgcccccggtagaggtcgacaaggacatcgtcctcaccgtccatacaaccatagtaataatccgttacatattgataactgtttccatcgtcctgattgacgatagtccgtgccatatcctccgccggcacatcgtcgtggtcgcccacgatgagcagatagtagagcgagggtgcggaacggtaaacctctttcaccgcagacttgatatgctcgggtgtccagtccccccgcaaccgggtatgcacaccgaagcccaatgtacgcttccagtcggccaaacgtcgcacggcctcctcgaactccggggtcgagagtatcagatagtccttgcctgcggagcccgtatcccccgcgctccgaaacatctcatatccggccgccccgacattcccgttgagcgtcgtattgtccaagaaagagtcgtcaggcgctattctcccctccggagcggaccgtaggctgccctctccgaaagtcacccgatagacgattttggaacaggcccgcacaacgccgttcttccagtcgtatcgcaccggatagacacccacttccgccacggaacgtccccggtacacccggacttcgcctgtctccacgacctcgcgaggaaaccacccttcgtagggagcgatgtcgggaacaaccgccggggactctttcccctcgggctgcggagcacgggcgggagagaggcgcaacggcacatcgacacaggcgctttcaagaaccgagacggtgaatgaggcacagccttcgggcagcgcaaacgagtcccaacggaccggaacgtccggctcgcccggaacgacactatgcccgaagcccgaaatgcgccacagataatgatccgcgacatcgggatcggacaaaacgaccgcatgcttaaactcgtaggtgaccgtgacgccgtcgggggagacggagacccgacgctcgggacgttctgccgagctttctccaacgaatgcccccgtctcgtgagagaccgttctcttttgagcgactgccgacgagacggtcaatccccaaatgcagaacaggtagaagatggtccttttcatagtctttgatttttcgatcgcttctcgcccgtcaatcatcatggctcctttccccataaaataaccggaagaaagaaacgagatgcctcttttgcaagattaagcatttatttgcaattttacaagaaaaacaatctttttttactcatacaatcaaaaaaactgatttcaagcgtaaacagccggaatcttccagcccctctcccttgccgtgtccagccttacgggggttgcaacgcaaagtatagagcgaggtaacacagacggagaataaaaacagtagaaccatgttatcgaaagatttctacactcctcccctgcgttttgcaacgcaaaatataggggaaggtggcacatagtgacggaggggttaaaaaatatccgcaacagagaaaacgtatcaaggtatcaaccctctcccccgatgtgccgtaaggaaatataggagaatgcccacaaaacaaaaaggccgttcaaagcgacgcttttaccctctccctctgctcatcgcagatgagatagggggagtagtgcccgtagggcgagggggttaaaaaaacagggggaaaagcccccccgataacaataacagaactgtaaatcaacctctccgaaaagactggaatatggttgttaacaagaaattcatcgctaaaatccatatctacatttccccactgattacctgccgaacccacattccccagacataaaaaacaacgaggcagagagtttctccctgcctcgcgattatattttgaaaaaaatccagtttagaacaaataagccgccgtaatggtccatgcccggctcttacctttcataaccgaatcgggaaggtcgttcttgacctccatggcactacccaatccccaaccatattgaccggcaatctgcaagtgattgaaaagttcgagaccgaggcccacatttatcgccgtatcgaaacttttctctttgaattgctctttgaaattatcgcccacacggaatgcaaaactcggcccggcatatacaaaaggagacaatatagagccgactaccggcagcgaaaacttatatttcaaattaatgggaatctctacataatcgacatgtttattctccgatataccactggttatatctttcaattccgaccccttccgagtatacatcaaactggcatcgaccccgataccgataacaggaaccataaactcggccatcagacctcccgtaaagctcgaaatattatttgccttgaaattatcagacaaatttccactgagagaaagagtagatatattcatacccactttgggaccgaacttaaattgtgcattggcaggaacagccaaaaacaaggcagcgacaagagctacacaaaaaactgtctttttcataaacttcattttatttttatttataatcagccataggctattattataacccatttctcgacctctatttgcacaaagataaaataaaatatattaaaatcataaaattgacagacaaatcgacaagaatcataaaattttaaagacccttatcggctatcgaaaaaaataacgtatcttcgacaaacaaaaacaaatatgtatttctatggaaaataaaccgaccatcgaagaagaaatcgtaaaaatgctgagaaccgtttacgatcccgaaataccggtaaatatatacgacctcgggctcatttacaacatagaggtaagcgacgggaccgtaaaaatagaaatgacattgaccgctcctaactgtccggccgcagacttcatcatcgaagacgtgcgtatgaaagtcgagagtatcgaaaatgtgaaaaatgtggatatccagttggttttcgagccggaatgggacaaagacatgatgagcgaagaggcaaaactcgaacttggacttttataacacaatcatgccggggaaaaaaatttacttcgcatccgactttcatttgggagcaagatatatcgagaatcccatcgaatacgaacgtcgtatcgttagatggctcgacagcataaaacaagatgccggaacgctctatttattgggcgatattctggactactggtatgaataccggtatgtagtccccaaaggattcacccgttttttcggcaagctggccgagctaagcgacaacggcattgacatacactggtttatcgggaaccacgacatctggattttcgattatctacctcatgaattgggcattacgatacacgacggaaccttgataaccgaaatcgggggaaaacgtttcttcctctcgcatggagataacgtcggaaaaagacccatgacatttcgcttcctcagaaaaatatttcgaaaccgcttctgccaatatctttacgcggccatacacccccggtggaccattgcttttgcattgcgatggtcggcccatagtagaaaagccggagatgactacgccgaatatcaaggcgagaaaaacgagcacttggtatgctttgccaaagaatttagggaaacgggtaaaatcgattttttcatattcggtcatcgacatatcctgctcgatcttgcactcccccatcagagtcgcatcattattttaggggattggatcaagcatccttcctatgcagtttttgacgagacaggactaaatctgttcgactacatcgaggaataacaagcaaaaagttaccggtaagtacgcatttaatattttttatacattcgaagcattcaaataaaatagtgcaaaagaaactatttatcaatagtttaccatataagaatcaaaaaagtatttataaaagcatattgtataacatattattttgtttgtttatctgcaaaaaaaggttgtcctttgtctcaataacctaaaacaatcttttttaccttaaaaaaattaatacctattgaaaacctataaaaaagagcttttgagaaaaagttcttttttgtttttatatccacacagtttatcgctacctcatacaacctatctctcgatgtgtaactccgtttacgacatgcactattttctgtccaatacgttacggagaaatatattttatcgcttaaccattccgaaaccctacatttcgataaaaaaacgaagattttagtatcaatttttcaaaaacatttctatatttgcaaaaaataaaaatataatattattatttcatataattcttttctaattgttttaattatgaaaaaatcttacactttcacttggattgggattgtaatatgtttactgggactgtcgccggtaagttacgcccaagctatcgaaatcaccgatagcaccccattttttgaagattttaacgaaatctcctcttccgaagaaaattttggattgagcggttggactctaaaatcgggatatgcgacaggaagtactgcgaccaaatggtcagtaaatacatcaagttcaaatgcatgtgatggctactcattaaaagccgatgatgccagagctacctcaacggcaatattagtgaccccgaaactgtcttttgcgtctggacgaaccgctaaaatttcattcttcatgaatcgagatacaggtacgcgccagcccaatgagggatttaaaatatacgtcaactccataggcgatatttacagctatgacgatgataacaaagtaattatcaacggagaccaaaccgttacgactctaagcgaacccattcttcacgccaaaagatacgcgggcactgagattactaaaaccggaatgtacgaaatgtcggtcaacattccgtccgaaatggccgggcaagaattttacattatcttcgaagcgatccaagaatatggaaacgccaattatatcgacaatatcaaaatcgaattgatatcggagcaacccaaattaatcaacgaaacgaaaaatatcgatctgggtatggtgaaagccggagaatcggcatcacaagaatttatactttccaacgaggaaataaacacgttgaatgctaccctttccgtagaaaacggcgaatcgtcgcctttttccgttactccaacaacaaccgatatcgctttcaacgaacaaaaaacaattaccgttaacttctcgtcggcagaagtaaattcatttaccgggaaattatacatcgactctaacggaggaaaagacacgattaccctatcggccgagacctatccggcaacagcctactacgaaacattcgacgaactatccaaacttccagacgaatgggtggtcgttaaaaacggaaatgaaactacctattccatcaacagtagtaaaggtgtaaacggatcaaaatgtttaagcggttctatcggctcttggggagatgaatcgaccatcgacacgatatttacccctgtcatatcgggaaaagtaacattcgatttcaagaaagccggaggctcttccgatgctattcaagcgtatatcgtaacagccgacggtacgcagaccgcaataaatacgggaacaggttcttcgtcatcttggacaacagtcaatgtcgacgatgtacccgaaggatcacgcatagccttcacactgaacaatgtctatgtagataacttcatagcattcactcggcaggaaatttccaaaggcatacagttggttaaagaagccaacaatagaccaagtagttggatgacattatatgcaggccccgacaaagccactcaaaacacattgcaatttgcagttaagaacatcgggactcaaacagtctcggccaacagctataatttcacaacccaattagtgaacgagaacaataccgtagccgaaggcgtctcctacaaaacttacatcattaacggagaagacacaaccttatacgaagacaatgttatccccgggcctgaaatagccgcaggcgcaggaactacaatcaagggttatctgttcattagcagcaatgacgaaaaaagtaaactatcgctcaatgtaaaagtaaacaacgtcgaaaatacacatttcacccaagtaaaaacgggcgataatataactatcaaacccaataagggggatgcctccttatcggctataaactttggattggtaaacaaagcgacgacattggattatgtaatcaaaaacaacagtaacaacggagcattgaccgtatcgaaaatcacagtgccatcggggtcagcattctcggtaaatgcagcactgccattggttatacccagtagcaaatccgatacgatccaaatcactttcaatgccgaaccgggtatatataacgataatatcacggtagaacatgacggtataggcaatacggaatttaccgcctccggaacaatgctatcggctacggctttattagaatcgttcgaaggcgaaaccttcccaccaatcctttgggatatgaaacaaggactttgggaaagaaatacgacgactaaacatcatggtgaaaccagcattgtcaatacagaatccacagtcgatacgatcatcacccccttgctccatctctcggcaggagactctattgcattctctgtaagagcgacctcatcttctggatataacactgatattctatattccgcagacggaaagacatggaatctgttaaaatctttcgccatttatggcgattattggagtgactggactgaaatggcggcttatatgcccgaagactttaccgaaggtgattattatatcggattcgccagcaaaaagacttatatcgacttggtttacggcccacaaattgtttatcaagagcaccgcatcgacattaaaggatttactggagagaacaaaggtatggtaaactacactcaaaactttaccatcgacgtggcttgcttgggcacagccggagaaacggccgaaagctattcgattgccttgatgaacggcgaagaaaacatcggcaactacacggtagaacctatgatattgggcgacatgaaaagctacacctgttcgtggaccccgagagccgccggcgaagcatcgatctatgcactgcttacactcgacgacgtagtgacctcgaccgacacgattacggtatctgttgccgaggaaagcctgatttctaccgttatgataggcgatttatcgacaacggccccctctcccaactacaagcactacctctatgaaacactttacactccggaagatcttgtaggattgcaagcaggcgacgtgatcgaaacggtaaatatcccctattacgccacagatgcagccgtaaaaggatatcgaataaatatctggataggcaataccgaaaaaacggctctcactaccgacaaaatgagcgaagcggacataacaggattgagccatatcggagcgaacttgcgatacgaagcgggaggaagtaaagaatcgcccctatatttcgaaatgagacccgaaaccccgatcacttacaatggtggaaaccttagcctcattgtctccgtagactccacatcctacaaatcgggtgtctacttcttcactcaaaagacctccaccaaatcgatgaagacttatagcatagacggtaataccagtgccgattatatggatacttggataaatggcggatatatcccgaaagtggccgaaaatatcatggtgatggaactgggattggcaaccgaagcgccggtcgtacacggcattgtaacccggaaagataaccaagccccgatagagggtgcaacggtaaccatgcaatcgggcgaagtcatttataccgctaccaccgacgaaacgggagcttacagcatttccgtaatgcaaccgggaaaagaatatgaaatgacggttagcaaagacaactacacaggtgtggacggtgtgctcgtgacagtaaacgaagataccgaacagaatttcgaattaacgattatcagtggaatagatcatacgacagaaaatgcgacgaaaatattcaccgaccgcacgggaaacattcatgtcgtagccgatgccgttatcgaaacgataaaagtatactcgacgagcggaagcctctgcataaccgaaaccccggcaagtgaatcggccgttataaatgccggtgatctgaaaggtatttacgtggtagaagtccaaacagcaggcagtgtgaagcgcgcaaaagtaaggctataacattgacttgaatcacatagcgacaggcggaagaactctggttcttccgcctgtctttttccttccccttttcccttcattcccctcgaaaccgcccttcgctctgtacgcacaagagagaatatttctccatacagaaataaatccttatatttgtagaatataggaggcggttcgacatagtcaaatcggaaatgtgatttccgtttgcctttgcactcacctttcgctatatttgccttacgggtggaaacaggctgcgcttcggcacaaccgaataaatttgtttctgctctcgctttgtactatttttgtaatcataggaaaagaagccatcgatgaaacgatatgcaatcatagtagccgggggaaaaggaactcgtatgggaaacgacattcccaaacaattcatcgaaatagccggcaaaccgatattagcccatacgatagaaaatttctaccgattcgatccgaatatcgatttaataatcgtacttcctcaaaaccaacaagaatattggaaacggctatgcgcagttcaccgaatcacaattccccatcttgttgtcaaggggggagaaacacgttttcattcggttcttaacggactatctcttatcccggacgaagggattgtcgctatccacgacggagtacgcccgctcacggctcatcgcgtaatagaaaattgttttcatgtcgcagaagaaaaaggcggagccatacccgttcttcctctaaccgattcattaagacaaatatttcccgacaaatccagcaaggccgtcgaccgcacggcattcgtggcggtacaaactccgcaaacattccgggtcgaagaaataaaaaaggcatacaagctcccttataacgacactttcaccgacgatgcctcggtgtacgaggctgccggatacattcccgaattggtcgaagggaatcgggaaaacttgaaaataactctgccggtcgacttggcaatcgccgaaataggattgaaggaatgacagatttagccggtttaaatatcaaataccttcccggagtcggccctaaacgcgccgaactcctgaacaaagaattagagatattcacctatctcgacctgctgcactattatccgtataaatacatcgaccgaagcaagacctacaaaataaacgaaatcgacggttcgatgccttatattcagttacgaggtaaaatcgtttcatacaccactcacggagaaggggcacgccgccggctcaccgctctgttctccgacggttcgggagtcatagagctcgtttggttcaaaggaatacgctatatcaccgaccgttacaaaccgggaacggaatatacgcttttcgggaaacccactcttttcaacgggaaattcaacatcgcccaccccgagctcgacccgatagacgatcgcatagacaacacgaccggactacaaggatactataccacgaccgaaaaaatgaaaaatgctttcctcaactcgaaagccatacagaaaatggtatatacccttctctccggaatacaaaacccactgcccgaaacattgccccttcccattatctcgcgaatgcaactcatgagttcgaccgatgccctacgcaacattcactttccggtgacgataggccacctgaggcgggcagaattcaggctcaaattcgaagagttattctacctgcaattacacattttacgatatacccggttacggaacctgaaattgggaggattccgtttcgaccatatcgggaattatttcaacgacttttatcatcaagtgctgcccttcgaactcacccaagctcaaaaacgagtcatcaaagagattcgagccgatatgggcagcggcagacaaatgaacagactgttacagggagatgtaggcagtggaaaaacactggtcgcactcatgagtatgctcatcgccgtagacaacggttaccaagcctgtctaatggctcccaccgaaatattggccacccagcattacgaagggctgaaaaagatggtggagccgttaggactacgtattgaactactcacggggtcggtatctaaaaaacgaagagctcccattttagaagggctcctcaccggagaaataaacctgctgataggaacccatgcccttttggaagactcggtaaattttgcgaatctgggttttgtcgtcatcgatgagcaacatcggtttggggtagagcaacgggctcggctttggagaaaaaataaaattccgccacacattttggtcatgactgccacccccattccccggactttggccatgactgtttatggcgatctcgacgtatcggtcatcgaccaactgccccccggacgcaaacccatacaaacactccttcaatacgataacaaaagagcccaattatacgcttctttgcgcaagcaactacaaatcgggagacaagcctatatcgtgtatccgctcatacaggaaagcgagaaaagcgacttgaaaaatttagaagaaggatatgaacacattcgggaaattttccccgaatatcaagtgtgcatggtacatggaaaaatgaaagcggccgaaaaggaaaccgagatgcaaaaattcgtatcgggagaagcccgcattatggtggcgactacggtcatagaagtcggggtgaacgtacccaatgcatcggtcatgatcatcgaaaacgccgaacgtttcggtctggctcagctacaccagctcagagggcgtgtaggtcgtggcgccgaacaatcgtattgtatcttgatgacatcttataaaatcaaccaagatacccgaaaaaggctcgaaatcatggcagaaaccaatgacgggtttcgcattgccgaagccgacatgcaaatgaggggaccgggggatatggaagggactcagcaaagtggaattgcattcaatttacaaatcgccaacttggcaaaagatgcacaaatattgcaagtagctcgcgatgaagcaggtaaactgctagattccgatgaactgttagaacgacccgaaaaccaaatcgtacgaaaagaactaaaccgtattttcgaaaaacaaaaaaactggggattaatcagttaaataaagagtttttactattttatgttgtaaaacacatttatacataagtgcatataaatcaatattttatatagaaaacacaaacaaatcggcttactggatacctaaattttgttaatcaaccagaacacattcctccaaaattcattatctttgaaaagtgtgtgcaaaaatatacgcatctttctttggtgggcttaataaaaaggctacttcgactatttattttaggacgcggcttatgccagaattagataaataaaatgtatttcggaaaaacaaaacattacattctacctctcctgcttgcattctcgctaggtaacttaaatgcccagcacaataggaatctctccactcacctacactccaaacaacaccaagacctcatcgcagggcaacaaaatatacacaaagaaataaacttggtcgattccatcgccctactcgaaatgctcgaagaagaggaagaggagtttcccggtatcgatatttatggagaaaattgggatcaaacatgggtaaacccatacaaagtcccgatagacaaattgcccgaatccgctactatcgatgtctcggaatattgtatgcccatcattggccatgttacatcgaactacggttggcgacgcagacgcatgcacagaggagtggatttgtctcttcatatcggagatacgatacgtgcggccttctccggaaaagtgagattaacacgatatgaacgcagaggatacggatactacgtaatcattcgtcacggcaacggcctcgaaaccatatacggtcatctctccaaattcttggttaaacccgatcaaatcgtaaaggtgggagaacccattgctttgggaggtaacacgggacgctccacgggtcctcatttgcacttcgaaacgcgctatttgggaatggacatcaatcccaataagattttcgactttgtaaatcaagtgcctcataccgaccaatatactttcaatccgaaagaattagccagcagcttgggatacggcagatacaagggcagtaacaacggagcgaaatacgtatcctatcgagttagaaaaggagattcactatcaaggatagccaataaatacggtgtctcgatcagtcatctgtgcaagctcaacgggattaagcgaaacggagtattgcgcgaaggcaaaatcttacgaataaaataaaatacgaaaagaaataatttcatttccactaaaacaaattgcttctttctataaaaggcattaacccttcggttaatgcctttttaatacattcgactcggctgccgagggctttgccagaaatttcgattcagtagaaaattcgtgaggtaggcttgaatcttagcgacggctctcttatctacaaccacattcccatcttttcggagagtagttaaaaagtagccgaatagatttttgataaaattcaacctccccctctgctcatcgcagatgagatagggggagtgcccgtagggcgagggggttaaattctacaatcaaaaaatcctataccccaaaaacgatgacagccttttcaatctctgcgcaaaaattaccgttccttcggcagccccctacatcgcagcaagaaaagtgcaaagaaccgacacctctaaaaatataaatatctccctcttttttctaaaaaagttcgatcatgccataaacaacagacataccggttctacatttgcctgaaaaaaacagacatatggaaacacaagaacagattctgaaagaacaacgattgagaatagaggtgttgagacatcaactcctattacgttattacgaactgctgctctcgttagacgtactgacacaagctgcggaagtaaaaactttgatgggctacatcaacaccctcgaacgatatgccaagcgattcgagaataagccctcgaagaaagaagccggaaagaaaagacggaaaaatacagccgacgagacgactgccgatgatatccaccccgaagcctctatctctctatccgaacacgcaaaggaactcttcgatatgatggctcttgacgacaatctgccatcggaagaaaacgaattgcctgccgacatcgacgacttcctgaaagccggatatgcccgttttctcgaacagcaaaaactacgagctcataaaaatacgccacatatcgaagacaactcgtcccgataaatttaaaacagcttctaagaaaaatccttatccaaagatttatacgattttaccgggctcaacaaaaaatttaaatatggcgtcctaaaaacatatttatttaaatatctttgtaatacaattaatccacagagaacaattcgacccattatgaatttaaacgagataatagcaaatattgttataccggcagcaatagcaggaatattgacacccattataatgaaaggaatcctaaaaacatcatggggacagaaaatattcaaacataaagacaatgcatcagaaccgtaaaataaaaaaacggcgcggacttgcaactatttaccgaacaaggcacgatatttatacagcaaatcgctgtactgcgacaaatgtctgatgggtaatagcgataccggagagtagcggtcgacatgaatacgataataatcgccatatccgttttgcaacgccttgtcgagataagaaatcgacttgtcgacatcaaaaccggcgtacatacaagctaaataaaaataatcgatattacgaaccgacccggaagccaaaagcgaacgctcccactcctcggcctgttttttcaaatgaagtttcgcaaatgcgattcctttcaaattatcgccataagcggcagacgtaccgtccaagctaagtactttgcggtaatccgcctcagcagctatacgattttccataccatattcttgcgtataagcccgtgccaaataagaatacggttcatcgggagctgcgacgacagcctcgttataacaacttatcgcctgcccgaagtcgccttcgtcataggctatcattcccctttccagacaaatcgccacattcgacgggtcatataccgccgcttgccgaacagcttgttcggcggcaacaagattgccgtctcccctctcgatttcagacaacaatcgataatattcggcattctgcgaatctttctctatcgctctttttatatcggctctcgcttcgtcgaatcgggtcaacctcgacagacaaaaggcccggttataatagaccgtatgaaaattgaaaaagttctcctccacgatcgtattccaatcacgcaaagaagatgcataatcataatggtctttataaatggtggcacgcacataataaagcataccctgccggggagaacgttcgatattccgattcaacccttcgataacgccgttatacgactcgttactataagcgaccagcttttgtatcgctcccgaatgcccgtcatcgagcgagacggcatagaccaaatcatcgactgcttcgggcatcatgtccatctccttataaatctcgctgcgctccaaataaatcttcggatctttgggcgagagattgacagcctgagctaataaatctttcgctctcacaggctgaccggtatgagcctcgactcgcgccaatcccataaatgcgctttgactgcgagtatccatgcgcaacaaatggttatagtcgattttagccatatcgtattgtcccaaccggcacagcagatctccccggtctttcagagccaaccgatggttagggactaatcgtaaagcactgttcaaatcggtcaaagcagacttggtctctcccctttccgacagaatcttggctctcaacaaataagcctgtgccaaatcgtccttctcttttcgaggaaaatatttaatcgcattgtcgatatccgacaaagcctttttcatatccccctgtccgaaataagccatagcccggctataatacgttctgtaatcctgtggattggcagccaattcctcggcatatacctccatcatggctttcaccaaatcatcgttttccgtcgcatgaagagcaaacgacgacgtgaaaaaacaaaataagataccccctataaaacacctgagtcgagaaaccattgtcaaacagcttttatatgttacttatctttactacccaaagacattacagcctgccgaatgcacaccaaccttgtcagcaagccttccaaaagatccaacggcaacatattggctccgtccgatttagctttacacggttcggggtgagtctccataaacaacccatcgacacccacagcgatacctgcccgggcgatagtctctatcaattccggcattcctccggtcacgcctgaatcttgattgggcctttgcaacgaatgggtagcatcgagaataaccgggaaaccgaacttctgcataatcggaatgccccgatagtcgaccaacagatcttgataaccgaaagaagttccccgttctgtaatcatcacatcgttattccccgcatccacgaccttttgagcggcaaacttcatggcctcgggcgacaggaattggcctttcttgatattcaccactcgccctgtttttgcagcagccaccaacaaatcggtctggcggcacaaaaatgccggaatttgcaacacatcgacatactcggcagccatcttagcctcctcggccgtatgaatatcggtaacgacaggtattttgtatgtatcggcgactttccgtaatattttcaaagccttctcatcgcctatcccggtaaacgaatcaaggcgagaacggttggccttgcgataagagcccttgaaaatatagggtatctgcaacgattctgttatcccgacgatcttttccgcaatatccatcgccatgtactctccttctatgacacaaggacctgccaacagaaagaaattaccgctatcggtatatttaagattttcgagtttcattatttcgattttaactgattcaacacttgtatcgtatggcaggcaactactccggccgtttccgtacgcaaccggctctgccccaacatcaccggctgaaatccacaggcaatagcctgttctacctcttcggggctgaaatcaccctcaggacctatcaaaatcaaagcattctctcccgggcgatatacctcggagagttctttccgctcgccctctgcatagcaatgagcaatgaatttctgtccatcgaaaggacgggcgacaaagtccgaaaaggcttccatttcggacaatcggggcaaaacagcctttaaggattgcttcatcgccgaaatcagaattttgttcagacgatcgagttttaactctttccgttcagagaatcggcatttcaacaaagcaatcgaatcaatgcctatctccgtgactttttcggcaaaccactccattctatcgagattcttcgtcggcgcaatcgctacatgcacttgtgcccgccacggattgggaactttcgattttttcaatatccgtatgccacaacgcttcggatgcgccagaacgatttcggccagatatttatttcctcccccatcgacaattccaatctcatcaccttcgcccatacgcaaaactctgacacaatgctggctttccgcctcagggagctcatgcacactttcaatatcgggagcataaaatatctgcataagacctcgttaaaagattaaactttctctgccttgactttggcttgatgtttatagtggaacgtcaatgcaaacaaaatgccgattacacaagcataagccgcaaagatagtccaacatgccggccagtcggtcaccacgccattctcgctatgataagcgataaccaacccagctccgtaaccgcccacgatagaacccagtccattcgtcatcatcatgaagataccctgagcactggcttttatggaagcgggagcctcatcggcaatgaaaagagaacccgacacattgaagaaatcgaaggccataccatatacgatcatcgataataccaagaatacgaccgggaagccctcgggaccaccgattgcgaagaatccaaaacgcaatacccatgccatgaaactgatgatcatcactctcttaataccgtaccggctcataaaaaacggtatcgccagaataaaaagagtttccgatacctgagaaagagaagagagtatgaccgaatatttcacagcccaagcctcggggtgagtcgccttgaaactatcgagaaaggggacgccatacatattggtcacttgaagggctgcccccaacaaaaaagagaaaagcaagaatacggctgtacggtaattcttaaacaaaaccaaagcatccaatcccaacacagacatgagcccattattcttcatcgccttagccggaggacaagccggtaaagtgaagcaataaagtcccattgcggcagaggcacacgcagccataatcaactgcccattattggaactgaacccggtgaggttatctatccacatagcgacgataaaccctatcgttccccaaactctcacgggaggatagtccttaatgcggtccaatccggctttatcgatagcattatatgcaacggtatatgacaatgacagagtgggcatataggccagcatattgaccaacatcgctattttgaacaaatcataatcggtaacgaacgccgcacaaaaaagagaaatagctccgacccaatgcagaactcccatcagccgttcggcattcacccacttatcggaaaccacacctataagcgcaggcataataagagaagctatacccgatagagcaaacacactgcccacgagtgcaccgtcgaaagccaagcccccgtcttcaacgggtgtcgtcatatataatcccaatgtacagagccacgatccccagataaaaaattggagaaaattcatgactatcagtcgaatttttacactttccatattcttgcgtttgtgttgtaataatttccttttttacaggacatggtttagattatctgtcaaaaataaagccgatcgagcactggaatacctcacttgtccgagcatcttaccgacatgcggcttatttcatgcaaatctaaaaaaatatcggtgttcttacaagttattatctcttttattcagctcatcttgaatacgagcggcttcttcataagcctcggaagcaatagccttttccaagcgttctttaagttccttacgggaacaattcgacaaactcttttcttcggggagttcttctgtctctacgacttctttaccttcattttcttcataaacaaatcctgcctcgtctataatatcttgcatgacatatatgtcggaccgtgtacgcaaagctatggctattgcatcggaagtacgggcatcgatacgaatctcacgcgtaccatcgtcaaaaagcatttccgaggaaaaaactccattctcaaatttataaatacaaacctctttcaaacgaatgccgaaaccgtgagagaaactcacaaaaagatcatgagtaatcggacgaggcggaacaataccttccaaagatatagctatagactgagcctcggacactcctatcacgacaggaatacgacgaggcccattttcttcggcaagcaccaaagcatacgcacctttttgtacttgactgtaagtcaaccccaacacctttaattttatacgagtatccacgtcaccacatttttaatcatacaaatatagcgaaaggcgagtgcaaagacaaacagaaatcacatttccgacttgactctgtcgaaccgtatcctatattctacaaatataatgaaaggtgtgtgtagaataaaacaaatacgcttgtttttcataccgaatcgtatcttatctctcggtttggcaaagatctcctcctcttttgttcaggctcagagggaactattatttattctattccgaatacaagaagcatcgttacaaagtaattactccactaccgacgcaaatatggcattccttatcatacacgacagcaaattgtccaggagcgataccctgtaccggttccgtcgaagagatagaatacgacttgccctccttaattaagagtcctgacgtaaaatcgggggtatgcctgttcttaaaagttatctcgactggcgattccatctctccccacgggtcatctgtaataaaatggaactccgccaactttaaaacctttccatattgtttctccgttccatacccgttcgatacgaatatcgtattggtatcgacatctttcgccacgacgtaccacggaccaccacttaatccgagtcccttccgttgtcctatcgtatgaaaccaatatcccttgtgagaacccaatatcttaccggtttcgagctctactatcgccccttgtcgttcgcccaaatgtcgacggataaacgcattgtagtcgatattccccaaaaagcaaataccttgactgtcacgtctggaagcattagggagcttagccgaaacagccatctcccgaacctcctgtttcaataaatcgccgataggaaatagcaaatgggagacctgaacagagtctatctgtgccagaaaatcggtctgatctttctttttatctcttgccgtggagagataaattttaccattcctctcggtcgtcgtagcataatggccagtagccgttttatcgaacgcatgcccccaacgttcctcaaagaaaccgaatttgatcattttgttacacatcatatcgggattaggggttaatccgagtttcaccgttcgcaaagcatattccataacatggtcccaatattccctatggagagatacgacttcaaacggaagtccgtacttacgcgcaatataagtacacatttctatatcctcctcggccgaacagtcgccttcgtcattgtccattcctatgcgaatgtaaaataaagtcgggtctatcccttgctctttcagccgatgcacaacaacggcactatccactcccccagataataatacggctacgttcatctattcgttctctaattccggttccggtgatacctgtctttcaaaattaaacttcttccatgctttctgacgaggtttctaaatgaaaagtcttcacgaagaaggcatccgcagaatatcgtccgggacccgcaagcagtataaaagtataaattcccaaataaagcatcggtaattctgccgtcgacaggctaatcggagaaaaggtaaaaaaagctgcaataatcatagaaaacatcaacggtaaaaccgccaaccttgtcataaatcccaacagcaccaacgaggaacaaccaacctctaccaatatgatgaggattaacgacagcttactactcattcccatagttgcaggaaacgtagatttcaaagtatcgaactgttctattttggcgatgccgtgagtcagcatcatgaaaccgataaacacccgtaaccctagttttgcccaatcggacaatcgttcacacaacaaaaagcgggagaccgttttagcgaaattcttcatattcaattttgttaattcaatatttaaataacaaccgaattgctcaaatagattaaatagaaaagactttgtggtcgattcttcctttttcaggtgttattgggtcaaaaaaacctatgctcacgcacagaggggatctcaaatggacgattcacatcgtttacacagaatcaaaaccacaaagtctttttacttattctccttcaatatcttttctacttcttccagcgaagtattgcgtaatattatcttcttatctttatccaccaaatacaaagcaggcataatcctcaaatcgaaataacggtctccattttccatagaagccaccacccactctttgggatatttctcaacactgcccaaccattcgtccgtctctccatcgggataaaccgacaaaataacgagtcgcccttctcttacttctttcaataaagactgcgaaacactcaacctcaaagtagtcaacgagcaatcatcgcattcgggatcgttaatatatagcaggacaaaaggcgcttttaatttcttaacacggaacttcttttcttttcccggtaatttatattcaaagtcggttaattccattcccaattggtttttagtcaaaacatcatattgataggaataacgcaacttacgtaacttatccacttttttcgaatcgagcaccgcttttacaaacggcaaataggcttcctcgctaactaaatgcccttctccactatatagatatttatcggctatatcggcatacatcaacaatatatcttcatcgctcgaagcccgcttcaataaaatatcaatagatttcaatgtactctctcgtgaagcgatacgcataatagaggtaaaatcgacgaaagcctgttccggaatttccctcgcatccaaatatgcgcggttttcaatatcaaaattatcccaataatgggcaattaagtattcgcttctaacatcgggcgtcaccaaactatcgggaatatcgggcaactgatatggacggacagactcttcttgtgcctccgacattacaaaggtacatgcgaatatacacaacagaatttttcttaccataaaatttcccatataactaacccaagagtaagagtaggagcaaacacccttgactatatcgatgtataatccgtttttgcatcagttgcaaatatacacaaattatcgtaaacagcaacccatttgacttttatatttagttcattcgtactaaatataaaatattaaatattttctatacaaaacaacagctcgattatttttttagatttttttattttcccacttcccccatttcatataagccgccgaaaataaaaggattccaatggcatagatatgctctgtcgtccagcaaatagcaacatcgaccctcagataaaatatcataatcgccacatagacgacatagagcaccagcgccatcagttccaaaataaacgcagcgcgagtattgcctgtccccgaaaccgactgaaaatagacattccccggaactataaaaatataggcggaacaaaggacaaacagagacggaagcgatgccgaaataagatcgggcatatcggtgtaaatgcgcaaaatccaattgggacaaaggataaaaaacaatataatcggaagcacaaacaaatatgccatacggatacactgattcaacgtgccccgtacatagcgagtatttccagctcctatcaaattactgatgagcgtactacatgtcgaagagaacgtaatgacaatcataaaaggcagggccgatacgttacgaataatattcgttatggccaacgatcgctcgcccagatgttccacggcgataaaaaacaggaaccatgtagacatggatataaaattttgaaccatcgtccatacagaaatattcaaaatatttcccaaaggttctccattccgcagaccgaaacgatttaatccatattttttgacatcgactcgtacacgggtgtaaacgacaaagaaaattaccgataccaactcggccaaagaagaaccgatggcggctcctgcaattcccatagccggaaatcccaatttcccgaaaaccagaatgtaattaaacacgacattcgacaataccatgacaatcgaattgagtgtcagagtctttgtttgggttgttcccacgaaaaaggcgcggaacatcacggctacgaatgaaaagaaaaatccatatacccgccagcgaatataacttacggcagcctcatgaacatgaggcgaatcgataaatcgttcgagaatcaaaggcgaaacgaaatgagatgagacaaacagcaccaacgctactcccagcaaaaaataggttcccttataaaatatcgggcctatcttcgcataatttccttctccgtttctccgccccataatgatttgcgctcccaagctaaacccgaaagcaatcatataaaatgtcatgtaatagactccggcaatggccgaagctcccaattcgacttcaccgacacgccccataaaggcggtatcggtcatgccgatgagttgctccataacgagactgataagaatcggataggcaatgaaccaaatctgtttatagctgaattttaccggattatttcccatactctttcaaataagcctcggcggcttcacaaagatcgttataccacttttctccaaacctgcgaatcaacggttctttcaaaaattcgtaaaccctcactttttcccgacggcccaatacttcggcggccttgcaaattttccaacggtgataatttaccgccgcaaagtctttgtattctttcaaacgcacaggatacagatgacaggaaacaggcttgtaaaaatcgattttcccctctcgaaacgctttctctacggcacattggcacattccgtttttaccgtaacaggtaaaaacacaatccttaccattcacgatagatgtcaccaaatcgccttcttcatcgacataggcaactccttgccgttcgataacggccttcgcttcgggtaacaaatcgtcccagataaccggaagaatttctttcaatttacgacattcttcctcggagaccggagcaccggcatctccctcaatacaacatgcccccaaacatttttcgagatcacagataaaaaagcgttctatgacatcgaggctcaccagcgcactacctacttgcagcataatttcttcggattctatcgttttcatctatctttatgaggaagaaaagccggaacgcaaagcatacgttccggcatatcatcatcgtcgatcgttgttatttcaacaaatcatgtcctgtcatttcggccggctgaggcaatcccataatgtggcaaatcgagggagcgacatcggccaaaataccatcttcgacccgtgcgttcttattctccgtcacataaacgaaaggcacgggattcaacgagtgagccgtattgggtgttccatcggcattctcggcattgtcggcattaccgtgatcggctatgataatcacttcatagccgtttgccttagcagcctcgacggtatcgcgcacacaagcatcgatagccacgacagctttttcgatagccgaatagacacctgtatgtcccaccatatcgccgttagcatagttcacgacaatgaagtcgtatttattttcaccgatggcggctaccaatttatctttcacttcataggcactcatctcgggtttcaagtcataggtagctactttgggagaaggaaccaaaatacgatcctcttcctcgaacggagtttcgcgaccgccattaaagaagaaagtaacatgggcgtatttctcggtttcggcaatgtgcaactgggttttatgcgatttcgacaaatactcgcccaatgtattatgtacattctctttgtcgaaaagaatatgaacacccttgaacgaggcatcgtaaggcgtcatgcaatagtattgcaaaccgggaatcgtgtgcataccggcctcgggcatatcttgctgcgtgagcacaatcgtcagctctttggcgcgatcgttacggtaattgaagaaaataaccacgtcgccctccttgattcgcccgtcgcaagtcgtgtttacgataggtttaataaattcgtcggttacatcggcatcatacgattcctgcatggcttgcaccatattatccgatttacgaccgataccgtttaccaaaaggtcataggcttctttcacccgctcccaacgtttgtcacggtccatcgcataatatcgtccgataatagaggctatctttccggccgatttagcgcaatgagcctccaactcctcgataaatcctttaccgctgcgaggatcggtgtcacgaccgtccatgaagcagtggataaacgtattttccaaaccatattctttggcgatgtcgcacaacttgaacaaatgatccagcgaactgtgtacccctccattagaggtcagccccataaagtggatattcttaccgttgtcacgcgcataagagaacgcagagacaatttctttgttctgtaaaatggaattgtcggcacaggctttgttgatcttcaccaaatcttgatagacgatacgtcctgcaccgatattgaggtgacctacttcggaatttcccatctgaccatcgggcaaacccacattctcgccacttgcttgcaactgcgaatgaggataggttttcaacaaatagtcccaataaggagtgggggtattataaatcacatctgcgtgcgaatgattaccgatgccccagccgtcgagaatcatcaatagtgcttttttactcatcttctatatctatttagagttatctaatttcatatatcaaccgacaaaaacaatgccgaactttccgaagagaaactctctaccccgacatctttgctttccccgggcatcccctgccaaattgcgggacaaagatagcgaaaggtgagcacagagacaaacggaaatctcatttccgacttggctatgccgaaccgtatcctatcttcgtagtgacaaagatacgaaaaaccaagagcagaaacaaatttacttgattataccgagaggaatattatattcaatttatttcaacaatctttttaacttctgccccccaaaaacaaaaatccccgaaggttgctttacaaacctccgaggatttttcctatcgtgcatttaccgctttacgattttatacgtcttgttctggatacggcacaagtacacacctcgtttgagagccgacatgtcgaaagtcatagccccaccgtaggccctgtccgaaagcaccaaccgaccggtcatatcgtacaaggtaatagatgttcccgtggttaccccctcgatatgcaacatatcgtctacgggattgggataaatcgacacttggtctgcttcatgctcctccacggcatcgacatagtgcaccgacacatggcaagtagccgtcagtgccccatcgttcaacgatacggtaatatcggcctcgccctctttgtttgaatgaacaatcccggtttcagaaaccgtggccaccatctcgttactgcttgtccaacgaaggcccgaaaaagtagcatgctcgggatagaccgtagccaacagagacaaggcttcatcttcacgggttatctggtaactctctgtatcgagtattaactttgtaggagccacatcagggaaagtctctatcgtatagaaaaaacgccacggagccgtacgacgataaacctcctcggccgatgccggcaccaccagagtgccatcgagagtaactgttgaaaatgtagtcatcgtcgcttccggaggagtagctcccaagcaaataacctttgacaaatttttacaacccgaaacatcttgcatggtcaatatcatactaccaactgtcaacgtcgacaaataggcacactcattaaactgcggcacaccactaatcttccgccctatatatagtgtatcaatcatcatattgccaccattgaaacacttgccttcaatcaaaataggccgattcccatcttttagttccaatgatgaaacagagtcacagtccacaaacgacgaaagaatagaatctaccgaagcgggtatagacaaagactttaaccgtctacactccccaaaagcctcaacacctattttttttactgaattacctatcgcaaggtgcttcatattactacaccccttaaaagcatagtcttctatacgttctacctcatcgggaatggaaacagattgcaaacgactacaagaagcaaaggcagatgtgcctatggttgttacacactgaggaatgtttactactgtcaatcctgtacaaccttgaaagagagaagcctctatccgcaataaattttctggcaaaacgacacttgttaaaccggtacaaccctcgaaagcaccttctccaatatccttaatattcatcaaatcgagggtaccctgcaaaggacaacccttatatgcataagctcctatttgcgaaacgctctttggaagagaaatctgcttcaactgagtgcaaccataaaaggccgtgtcacctattacttccaaaccctcgggcaatacaatctcagttaattggttacaatttctaaaagccgatttacctatccgtttcacctcttcggctactcgataaatccccgaaaaatttttagggcaatacaacaattctctcttatccttactatacagcacgccatcctcaaccataaaatagggattctcttcgtcaacagtaatcgaggtcaaagaatcggagttcaaaaatacattctcccctatcgtttctaccgattttcccaaatgcacatgagtcagtccaatacagttagcaaacgcataattgcctattgtctttaccttatcgggaataacaagatctcgcaacgaataacacccataaaatccataatcacttattcctaataaggcttccggtaaatcaattgatttaattcgactgtaagccaaactacccaaagagctgagtgtattcggcaattccagagacgttatcttactcacacaggaataataatccggataactcgatgaaaaacttgtaactctaaaaacttgcctattataagttatagtttcaggaatcgttacagcatctctataaataaacggtcgccaacccactctaaattccatataataagtcacaacgtttgctgttttttcactttcaaaaacataatacattatattatcagattgataataaggatattccggtggatatccaaacgtaggtgacatgtacaacatggacaaaatcaacaacaccactacttttttcatagtaaacctccttatattttgtgttttgtaaaagtaagaaaaatctgtttttcacaataatcggcagccacttttttcaaaaatattttatattatatcatcatgccataaaatcacttcttcccgattctacttttgccgtgtattaatcactaaattttttaattatgacagcaaatgaaattttagcggatatcgaaaattacgaaaagttcgatccggtcaaaggaacagtcgaagggaaaacttatgtggtagtcccgactactacagaaacaggcaaaaattcagacgtcgttatcaatggacatatcaccttagcccacaacacgacgttgatttttgccggaggaaaaatctcagggacaggcacactcaccggcgacaatactcggttgatagcccctatcactcaaatttttggcgaagacatcaccgtcgacggcatttgggtaatggatcgcgcctatcctcaatggttcggggcaagaaacgatatttccaacaatgaattttggcatctgcgcgttgcttgcgaagcagccaaatctaccgaagagaaccctctcacccccgcagcagaaaaagacaatattgaagaagcccgaaatgcggccttaaaaaacttaaaagcatggaaagtagactcctccgatgccatcaacaaggccatgaaactgaaacatgccggagaagtatttctgcccaaaggagagtacgccatttgtaaaactttgaaagttccttatggtattgtacttcgaggagaattggccgactatcgtcttaacagcagtaacatacagttgcctatcggtgattatccattaggaggagacactactcccgacgatctttcgtcttattataaattagggactgttattcgccccttaaacaccaactatccgctcacagtcgatagcgacgggacacctatcacctcgttcgacaacaattttgcggttgtcatcaaccctaatattcacccgaacgagaatcataatgaggcatgggaacaggaattcccttctgctttcactacgatacgagatatccagtttataaacttttggacagagactcccagcatgcggggaatctatgcgataggcggcatgaaaatcgagaatgtcagttggagtcaattcgtacaagccgtagccacacccgacgatatgtattgcgacggaaagaccattatcaactgccagttcaatgctcccaccgggtgtattttttatggctctatcttccacaaactaataatacagaccgaaacagaaaagatcgagaaaataataaaacgatttgttatagataaaaaagagtattatgccttcgatttaagcggattaggagacaatctatatttccaccacaaccatttaggtatgggcgaaattactggaggattaaaattaagaagctctaacggagcacaaatcagttgcaatattatcaacgacaatatcgcattttataactgtaaaggcatttctttttctgccaaccactgtgaagatggcattcaagtaaaaatatccaattctcaaatcgatttctccggcaactatttccataaagggaagaaaccgacattccttattcgagatgattatgcccgaggctcgatcaatgtgcaatcgtctacaatagccctgcaaaacaactctttggttttcttagaccatgaagatgaaagttccaaactttacataggaaatatcagtccttacgatatccaaaccgacgggtatctatccttgtcgatacaaaacacctatcgatatcgtacacccagaaacgcaggaggcaatatacacccttgcggaataactattcttaaagagatttggacagaaggagtagccgagcctgaattgattccgtttaccgagttcaacgatttgagttatcttttatccgggaactcactcatcaagcccaacttccatatcgtacacaaccatgtggtgaacaacacgcagtttttccgaggggcggctatggccaacaacaatatcgtatggttcctcgaaaaaggcgcataccattaccgcatgcagactatttgggataagaaacgactaatcggcagttcgactttaaccttaggcaatttcaatttaggggaaattggttctaataccaacacgggaaaaccgcaaggtctcttgttgaacatcgggaccaattcttatgacggtcccagcgacggaaatggcaaccaagtagtcattcgactcatgcgagcccgtacgaacggaaatacagcttaccacagtattgaaattcccgtttgcggaacccgcttcctatatgacaatggtctgtcggtatgcggcttcaaatggaagcaggaaccatcgatcgctccgttgacagtcaacaccatgatccaatctatccactttgtcggtgacaacgttgtctgcaaaggaaccgcttgtcctaccgttggcgagtggaccgtgggtgatattgtttacaacacaggcgcggcatcgaacaatgccatgtggatatacactgcaaacggctggcaagcccgataaaaaatagatgagctctacttagaagctgttttaaaacataaaaaccgcaccgaatattcggtgcggtttttatatgccttgtaagaaagattaaactcttctttctttaatacgggcttttttaccggtcaacgcacgcagataataaagtttagcgcgacgtactttaccgcgacggttcactacaatctcttcgatgaaaggcgactcgatggggaaaattctttccacacctacattacccgacattttacgaaccgtgaaacgctttttgttaccatgacccgagatacggataacatctccgcggaattgctggatacgctctttgttaccctctttgatacggtaagatacggtaacggtgtcaccactacgaaactcggggtgctctttaccgcatgcgaatgcttcttctgcaatctttactaaatccatttttaatagctatttaaaatgttcatactgaaacgtaatttaacaggccacttctcctgccagagattacgaaaagcggggcaaagtaacgactttttcgccacataaacaaatatgccgtcgattttttcggacaaaccgctcttgcaaggttaacaaaattcaatcttgggagcaatttttgatatattatcttcaaatttgtaatttcgtccaagagaaaaaaacgacatactaacattcttcacatcatgataagaaaactcataggaataacggccatatatttgtccgtttctttgtgcggactggcacaaaccgaacgcatcgtcattctgcacaccaacgacactcacagccaaatggaacctttcgcagccacccacaaaacatacggaggtttgggaggagtgatgcggcgtatggctattatagacagtatccgcaatgccgaacctaacgtattattagtcgatgccggtgacgctattcaagggacaccctatttcaaccttttcaaaggcgatgccgaattcgaagcgatgaacgccatgcgttacgatattcgcactatcggaaaccatgaatttgatgcgggtatgaccaaactggctcaactgataaaaaactcgacagccgattttatctcttccaactacgacgtatcccatacacctttgcacgggaccttgcaaccgtgggtcatcaaaaaagtcgggaaatataaaataggatttttagccttgaacgtcaatcccgataatctcattccttcggaatcgtgtaaaggggtgatattccacgatcctatccaagcagccaatgaaaccgctgctttgcttaaacaaaaaggtgcggatatcgtcgtggccgtatcgcatttaggatacacggtacaagacaaaaaagacgttaccgacccacaaatagcagcagcaagcagcgacatagacatcatcatcgggggacattcacatacggtcatcaaccccgacagtatagacaataatcctctctctaccctacaataccaagttaaaaacaaagatgggaaaaacgtactcatcactcaaaccggaatgagcggagcttacttaggctgcattaccatagaacctcgaaactaactactaaaccgttatgaagaaattaaatacatactgttctatcggctgtctttcggtcgttttgtcaatcctctcgtcctgctccacgtcccgacaggaattcgacatttcttacaaactcattcccgtcgatgcccgttgggacaagactcccgaaccgctaatggaacaaatagtcgataaatacaagacaagtgtcgacagcataatgagtatcgtcatcgggaaatcgagccaatacatggctccgggcagacctgaaacctcattgaccaatctttcggccgacatcataaaaaccgaagttcaacgagatttcggtcaaccggtcgattttgcgattatcaatacaggggggatacgcaatccactcatgcagggagatattacattgggcgaaatatattctatcttccctttcgataatacattatgtctcataaaactaaaaggttccgatgtacgcgagttactcaatatcgtagcttcccggaacggagaggccgtgagcaaagatgtacacatgaccattgccgacgaaaaagccatcgaaccgaccgtcaacggcagacctatcgacgacgatcgtatctattccatcgccacgatagactatgtagccaatggcggagatcacatgaccccgttcctgaatgcaatagaacggaaaaacagcaacactttcatgagagatgccgttataaatttcatcgagagagaaaaccgggagggacacaccatcgcacctcccaaagggggacgcataatctcatcgaataacaagtaaccggacatgaaaaagataattgcctgtatcgggacgttttttgctttggtagccctatctacgcaagctaaaaacccgtatctacttcaaacggccgatcagtcggctatggaacactgggtcgactcggtgttcgaatcgctttctcccaaagagcgaattgcacaactgttagttattacagtgcgcaacagcgataccccgcaaaaccgtaaaacgttacaaagactcatacaaggacaaaaaatcggtggactgcttttcgactcaggaacagcaaaagaccaagccaacttaacaaactactgtcagtccttatccaaagttcccctgatgatcactcttgacggagaatgggggctcgccatgcgtttgtccgatactccgcgctttccggtcaacatgatgttaggagccgttcaaaacgattctctcctctacgaatacggccgtgccgtagggaagcaatgcaggcgcatgggcatacatgtcaatttcgctccggttctcgacatcaacagcaacccgcgtaatccggtaatcggcaaacgttctttcggagagtctttaaaaaatgtctcgtccaaagctattgcatacgccaaaggattagaatccgtaggagtcatggccgttgccaaacatttcccgggacacggagatacctcggaagactcgcataagacactcccccttgttcctcatagcaaggaaaggctcatgagtaccgaaatacctccattcaaagcatatatcgacagcggactatcgggcataatggtggggcatctgaatattcctgcatgggatgccaccaataccccctcttccttatcgccgattatcacccgcgaacttttatgcgactccttaaatttcgaggggttaatattcaccgatgctttaaaaatgaagggagcatcgaaattcggcaatacggcactacaagccatactcgccgggaacgacatcgctctgaacccatcgaaacccgaagaacagttgaacagcattttatcggctatcgagcaaggaaagataactcaacaggccatcgatgaaaaatgtaaaaaagtgctacgctacaaatacgttttcggattagcgaactatacacccataaaaaccaaaaaccttatcgaagatttgaacgctcccgaatacgatgcccttaaccgaaagctcaacagcgaggccatgaccttgctacgtaacagtcaaaatctaattcctatcacacatttgaacaagggcagaatcgccgttgtatccgtggggaacgacacggaatcggttttccagaaaacaataacgctatacgccgacaacgtaggccgcttcgacgacagcaatcctctgccttcactgctggacacactgaaacattatgataaaatcatactggctgtacatagcggcaatgccgaacatagggccagaatcggccgtatatgccaaaccgggaaagcaatagtcgcatgctttctctccccttatcagatgaatcgattaagtcacgaattgactcattgcaaaacgcttttattagcctacgaaaatacctcgttggcacaagaatatgcagcacaagccctattcggaggatatgccataaagggaaaattacccgtaagtttagaaggttcgttcaaactggaagaaggcatatatattccaaagtgccgattgggatatgcgattcccgaatcggtcgacatggacagccggatattgtctgctgtcgattccattatagcacaagggattaaagaagaagcattcccgggctgtcaattattggttgcccgacaaggaacagtagtctggaacaaggcttacggatacttcgactacgaaactcaccgccatgcagtcgccacaaacgacctctatgacttggcatccgtctcgaaagcgactgggactttaccggctatcatgaaggcttatgacaacggacgtatagatttgaacaaaccgatgagcaaatactttgctccactgcgaaataccgataaaaaaagtctgacgatcaaggaagctcttttacatgaaaccggtatgcctgcctcattgcaaatgacttcggtcattatcgaccccaacagcttcacgaaaccattaatcaagcgtaggaaaagtagcatctactccatacaaatagggaataacacttttgctaaccgcaatgcccaactacgcaaagacctattatcctctcggaaatcggatcgatttcccatgagaatcgcccagaatttatatggttcgaaatctttgcccgacacccttatcaaccgtatcatcgagtgcaaattacgcccctccaaacgatacttatatagctgcctgaatttcgtcttattgaaagagactgtcgaaagcgccaccggcattgcgatggacaaatatttgcagcaaaacatctacggacccttaggcatgcaaacgaccggatatcgccctctcgaccgatttccaaccgaaagaatcgcaccgacagaatgcgacaacttttaccggaagcaacaactgatagggtatgtccatgacgaaacagcatgttttttcggaggcgtacaaggcaatgccggactcttttccaacgccaacgatttggctaaactatgccaaatgtggctaaacaaagggacatatggaaacgaaagaattttatccccgaaaaccgtagaactgtttctgacagaaaaaagctcgaccagccgcagggggctaggattcgacaagcccgatatggacaacccggaaaagagccctacggccatcgaagcatcggcctcgaccatcggtcatttaggcttcaccggcacttgcttttggatagatcccggacaagaactcatctatatatttttatgcaaccgggtatatccctcccgcacgcatggcgcgttatctcaattgaatatacgtcccgaattattctcgaccatttacaggtccataaaaaatcattcgaaatagaatgacaatatcaccatattcgatgtcgctttcttcaaggactgagtaaatttaatatcggccggatccctcaaatcatttcgtttccggttaatgacgtctgtaagtccgaaacagaatttcaattcgggaatcaatttaaaatatggtaaataaaagtcacaaccgaggccgatagtcaaataaccgtcgaatgtattcagtttaagcaaatcgtttctctttttcgatacgtcggccgttcccatgactcccccgatcaggtatggacgaaaattattacaacgcaaagcactgaatttcaattcgagaggaacgacgatataattcgatttaatgtcttgtgtccgatattcctgcgtcgccgtctctctaaacttcaccactttattcccgaaaaatatacccggcgaaaatctcaaattcaaatgggggcacaaataaaggtcggccatcaaattcacattgaacccgggtgaaaaatcgggaatatccatgtaccaactttctccaccatcggtaacgaaacccgaatgtacaaacttcatatcttgcacatgcgtaccaatagaaaatcccaaatgcaagagtttatgatctacatacggtaaattctgtactttacgaggttgagcacatacacataccggccacaacaacgctatgcacgccacgaaaacgtacaatcgccccacgtatctacggaccgtaaatccatgtaatactttcccttgtatatcactacctctattcatagtacgataactatttatcaaacggaaaaacaagcggtatattgttccacaggaattgtatttgacacacaaattcctactccttttcttttgcaatagagagaaaaatgctacttttgtgtcgcaattagatctaattatttcaaactaaaaactaaaaacaatggcttacgtaattaatgacaactgtgtagcttgcggttcttgcattagcgagtgtccggtagaagcgatttcggaaggtgatatctacaaaatcgatgcagacaaatgtttgagctgcggtacttgcgctgaggtttgtcctaacgacgctatccacgaagcataagcacaccggtaaaaaaattaaagaaaaggctacttggttttatcccaagtagcttttttgattcagtataaaattcgtaggggtagacttgaattttagagatgaatctcttgccgacagcctcattccgaatcttcttcggagaggggttgggaaagacaacataggagttttcgattgtaggacttaacccctccgtcacttcgtgacacctcccctatattttgcgtcgcaaaacacaggggaggagttttaaacacaccgtaaggacacgagagatgacaagggaggaggtttaatatccttctaacgcattttttagcgaataagtggattgtgtttgtcctcctccttgcattgcagtgcaataaagggaagataccgagaaacatcagtttctgaggagaggggctggaatatacaaggacgctctccactgattacctattgagcttatttttttattatcacgaaactccaattcacaaaacagaaaataaaaaacgtgacaactcatatccgagaagtcacgctttctataaatagttataactcttatcagttattatccgccggtttcaccgatacatacgaacggttttctttacatttacggaacactaccgtaccgtttaccaatgcgaacaacgtatggtcttttccaatacccacgttttctccgggatgatgaacagtacctctctgacgaaccaaaatattaccggccttagcatattgtccaccgaatattttgatacccaatcgtttgctttccgattcacgaccgttcttcgaactaccaacacctttcttatgtgccattttcttagaagtttaatagggttaagcaacaatttctttaactaacacttcggtgaaatattgacggtgaccgttcaatctacggtaaccttttcttcttttcttcttgaaaacaagaattctttcacctttcacgaggccttttttaccgaaaccgtcgttcgaaacaacctcacacacgactttcgcaccttccacggtgggagtgcccacggttacagctccgtctttatcgacgagcaatactttgtcaaattcgagaacagctccatgctctgctcccagatagtggacaaacaatttctttccattttctaccttgaattgttgtccttgaatctcaacaataacgtacattgtatttttatttttacgttctctctgccgggcggggtcaaccgagacacctctttttgagcccatatcagaatcagcccacaaaagtactataaaaaatcattccgcacaaacattccgccgattttctctgaaaaagaaaatcaatacctccacaatcaattcctaaacaaaaatctttttcttgtaatatatttctcggaactctttgggcgagcacccttttttcttcttaaatatgcgattgaaattcgacaggttattaaatccgcattcatagcatatttcggcaaccgttttcgtcgaatcgaccaactgtcttgtcgcatgtcccaaacgtatatcgataatataatccgacagactttttcctgttcttaatttgaaaaatcggctgaaagagaccggcgtcatatcggtaagctccgctaattgcgacaatctgatttcttccgtataatgtaaattgatatactcctccactttttgtacccgacgactatccgacgcagtcttggatctcgcgaaagaactgctcgacaacgtgcgggcatcatcacaaatcgacaattcatacaggattgtcaaaaattttacgaactgataaaatcccggttctccttttaacaaagaatctattgtcgaatagactttcatcaccgcatgcagagggaacgacaatcccttttgcgccctatcgagcattttacggatagacgtgaattgcttcttgtcaataaaattattggaaaataaatccggagaaaactgtatagtaatttcccgaatctgcttggattgacagtttccttgttcccatacatgctccaaattatccccgcaaagcaagaccaaatcataatcgccgatctcttctaccgaatctccgacaatccgccttactcctgctccattctcgacgaaattcagctcgtattccttatgattgtgcaaaggatacgtaaactccgttttgtatcgttccacaataaacaagcaatctttttccgacaatggagatatttctgtaatgatatgcttattcatgctataaccatataaatgagggtataaagatacatattccgttcagcattcaaaattataagtacaatttttatacctcatctccaaagaattaacacccattcggaattgattaaaaacccaaatgcaaaaaaaactctcttgacccaataagctgattcagtagaaaattagtggggatagacttgaattttagagatgagtctcttgtctataatccactctgagtacctattgaatcgatataccctttaattatcgactaagtcaataatctcccgtatttctcccggtcgcatttaaacgaacaagcccaacttattgaactacaataaattgggctaaaatcagtcggggtgagacgactcgaacgtccgacctccacgtcccgaacgtggcgcgctaaccaactgtgctacaccccgcacttagttttgcggggacaaagatacacaaagtttgggaaaagtaaaacgaatctttcaaaaatctatatttaaaatagaaatatcttcttttttcatttttacggtaaaaaattaggaagataatcaaaaataattctatctttgcacacgcaaaaacgatggtgccatagctcagttggtagagcaaaggactgaaaatccttgtgtcactggttcgattcccgttggcaccacaaaaaaggactcgtaaagacgagtctttttttgtattcgaacattactcacgaccaagacactcggcgacatacaaaatatagaggagcaagcgaagacatttcgacgagagtgaatataatgcttccctcttctcaaaataaaaacgataatccggcacaaacatcagtcgctacgatatccgtgttataacggtattgtccccctttcaaatcaagttgcaacaggtacttctttcctacttgtcgagagcaggtaaaaacggcataataaccgacgtaatcggaagaaagattcttgtaattataacaccatgcggatagaagggcggcatcgtcaatcgaggaaggagtatgaaataaccgactatcaaaaatcatagcataatttccacctatttccagtcgtaaaaaccaatctttcgacatgcgggaaacagacagcgctacctctggcgtaacttctctcacactcattttccgcaacggatagacgtactcagcttttactcgcccataatttactcgtggctgtacagaataattccacccttttctacgaaccgcttcataaaatcccgaaagggtgagtctgtatgcatgactactatactgttcggcttctccaattttcggataaatctggttcgccgcatcaccgaaaatattttcggtccccaatttcaattcataattcccagtcaattttataccccagctctcaatacccgacaaacttttccgatacaaccactctccggcgaaagtatgccgcccaatccgagccattggcaattcgttcaaggaagatataatcttttcacacgagaaataacgatacgccacattccccacgaaaccgatcgaacgcgaagtgtgcacacccaaacttcctccccattcgtatccgttataatacgtggaataattatttccggcaaatcggttataatgcattcccaacccggtgagatgatagactttcgaaacacccagctcactataaaatttaattccgttggtttgcttgtactttcgtcctgagaccgaaatatcgaacaaataggaaggagataccggtatcgacaaacctaaggaaagcgacaaatccgacgtggtgtttttaggtctcggatctattcctcgataagcgacggaggcctcgtacgaaaaattaccgccccatgttatcgattcataacgagcggcataccccccggtaaagctataaatctctttcgacaagtctccgcccaccgaatcggccaacaaatagggatacaacagctcccaatcggaggtctcgttccacttcaaatttttcacacgtccatttctatacaacgcatttccccacaaacaataattcttttttcgtatgtacgaatcggcttgaaaacctatcgatttttcaccgtttcccgattgtaacaacacaggctcgctctccgaagtatattgtccgccgacggttgcccgcgtaagagacgaagaataccggtcatagcgtaccgcaggattacgatacgacaattcgacaaaagatgcaactaccgatcgatgttcccacagacgatcccatatagaaacccgaaccgtatctccggctcgtaactcacagagacacaccaagcataatacgcaaaagacacacaactttttcatatccctctaatctatcaactcttgacctctactccgtcataggtttccgtttcggccttcgtaccatttgcatctatcgcagtatgctgttgctctatcaaagagggcacacactcggtattgaaatcggcagacgaatcgttggtatccttcaatacccgacgaccgtcacgggtgagataaagcatttttcgacgcacacttttgaaatagcgagtcttatcgtggtctatcgtaccacagtgtgtccacccccggtccaacgaaggggccgtgacattccacacatactccgattgtacactggtattcactgcatcgataatccattcgttcggtactttataggcggtttgctccatcgggaaagtcccggccggtaaaaccataacataggaataggtatataaattttcggtcaagaatttttctttctcaatgggaattctcgctatggcaaatcccctgaatccccgattgtggagaacccaaaaacttttcgtgtaacaataccacttatcgagattaggaacggtcggactgtctatatccaaatgagcgggaaccgaggattcgtcataccactcataatccgcccgactcaaatcaaatgaattgggattcgcgatacgatggtctatacccgtatcacaaagaataaacgactctccgggagcgaccggatggtctgtcccgctaccggggattacatacacagcctgtacagtcatgtgagtgctcataatatcgggtgtataatcgaatttttgagtcgtaacaaatttcgactccatcaaagcgaccccatcggcatatagcatgtgatcggtattgttatagattttcacataaccatctccatagtattgttttccagaagactgcaatgtcccggtaaaaaatatttcctctataatgaagtcgtctttattctctacctgataactaccgatagaaacacttccttgtgctcccataagctccaatgacctagcatacccggataacgaagtatgaattgtgctatcggcagtctgataagttatcgcagcttcataagaacaatcgtataatccctcgggcaatgtaattcctttacgggtcgtaaaactggtaaccatacccgacgtaatatttcgaaattcaaaggtttcactttccacagaaatccccgacaaatccgacggataccggacaacgatttcgacagtcgtccaacgtatatcccgttcctcgtcacaactacaaaacaaagccagcatgcataaggaaacacaaagtgtaattctattcatatatttcataatcaaaaatttaatctatcataacgtaaaattaagttccataccgaaataaggatccacattgcgccgtatgagcagaccattcatcttatatgaaggaagataatctagaatacgattagcgaacaatgacaatctcaaccatttgcctatcgttttggtcgctttcaggtttacataaacagccgtgggtattgtctgttttttatacaaatcgtcgttatatgtctttataagaaactgcaatttaggatcggcagccgacacctcggtatagggatataactttccgtcgcttgctgccatataactcaccgggactccatttttccacattacccgagtcgaaacaaaccacatgcactgtaccgatgtggaaaaaatcaacccccattcgggtatttgagtgtctaactgaaaattagtattaaactgttcgtttactcgaccgtcgttccaatcgtacaaacccacgtattcttccgaaaccggacgattgtccactacatcggccacagtctcgaacataggacgactattcgtatataccgaacggaaccaagctccgtttataacgacggcagtcctcagtgccgatatacgttgtgaagtaaattgaaactcgataccctgtttatcgatgcggctcccattggccgactgtctataaccgttcaacgccttcatatcggtataaggaatgtcttccaaagcaggaggcccttgtaacccagaggcatcgactgccgaatggtcatacttccgataactgaacggagcataaaaagaggaagtccgaaatcccgatgtaagattttcatgaaaataagttaccgacaaccggtttccctcaaatgaaatatcgcctcgtacttcccacttatgattacgagccggtttcaaatcataattggttatatcttcgatataagtaattatatttacccgactatattcgagcggtttattcacatcgtaataattgagttgcactatgtcgttataccacaaatcgggataaagatagtcgagcgtaggcatcttggtcgtcacaccataacctcccgaaatcgaaatgtgcaagtctttcccagcgacaggaatcgcagggaagctccattgtgcattcgcacgaggatctatataaggctttccttgtaacaaatatcgctcgctcattcctatctgtgtcacagaacgagctcctacttgcagttccaatttattcttccccagcaagaacaatgtatttccttccaagaagaacgacagattctgcaaggccggaatatcgctataagcccgagggcgagccccccagctcgtcgaaatagggtgggataaatcataaacttgccccttcccgaaatttttggaataattccattcgccaccggctttggcgttcaaccgatattttgcgccttcccagccgaactcccctttggctttcagaaaagcattcaccggtttcccatcgcataaataatcagccacatactccgaaaaaagataagtaccgtcatgaaccccgggctctttaccggtaggtgcaaccgtcgctcgctgaggactaataagcttcgtccttttcaactgatcggactgagcgctcaccgacgcatcgagatttaccgtttttatccattttaaccgaggaaacgtccatttgaaattgtttgtcaaagaagctctgttatacgacgatttatatttgtctattttttgatagctcaaatcgggatctgtcttcacgttatcaaaagatcccgtataatccgcactcggtgtccatgtcatctcccacttatcccgcctccataatttcgaaatgcgaacagaaaaattcactcgcttataattttcaagattattccggggatctactttcgagtccaaaaaaccgccgtcgacattcaatgtgaaatcatggttgggaactgtaaaacctttccccaccgaaaacaatttgctatattcatcggctttaaaacgagctgtaaggggtgtcgcctttctcactctctttatatttaccataccactggtaagatttccgtattcggccgaaggtatgccccgcacaatctcgacactttctatatcgtctgttgtcagcgtgcgcatatctacccctttgttcgtcatatttctgagcgattccggcgaggtcccgtccgaagaagttcccccgggaatatattgcagattcgcatcgccgttaagaggagccccatctactaaaaaaagagtacccaacgatgtaatggcataatcgggattggaatattgttctcccgatgaattcagcgttcccgtttctctcaactgtatggaattgacctgtcccatcgaaggggtcttggatatattccccggaagtagctccaataaatcgctaaaactggtaggctgcaaatgggtcatcatttcgcgatttattttcgacgagctcaccagcccctgcgactcccgcgccgtcacgacaatttcgttcaacgaatttcccgaagggaccatttttacggtcagcttcgtatcccgtttcagtgtaacccgtttttcataacgatcgtatcccacataagtaatacgcagtatatagtcgcccggatgcacagagggaaaagaaaatactccgttatctttggacaataccgaatgaacctcatctccatgcagtaattgtaccgttgcaaacgataacgggtctttcgaacctatatccgaaattaccccctcgaaagaaaccgtagctacttgcgatacattcacagagtacatagtctctattcccacataacttattaatataatgaaaaataatcgaagtcgcatgtcttaatttttgtggacaaaaatacaaaatgcataaatctcgcaccctcaccaaaaatggctattctatgtctaaaaaatacctatatatcattattgtagcccaattatgcagaaaataactttgcggtgtcgaattaaaaaaaatttgttatgaaaaaattcttactttctacactcctctttatcggaggaattttaggatcgatacaggcagagggtcctgtatttcaatgggcgaaatccttagatggaaatcccgggaacggaggtgacaatgctcacagtttgataaagagcagcgacggaaaaattctggcgctcgcacaattcgggtcgatgaaagacaacgatcctgtttactatggagatgacattgtcggctacggttgtgctactcaggcaaactccgacaattgtaatatcgttcttctcaaattagattcggacgggtctaaaatatggagcctatatagcttctccggcgatgtaagcatctcttcgagttccattgccgccacttctgacggaggtgctgtcttagcattaaaaatgagatatgcatccggtatgaccgataaaaccccagcattcaaagatgccaaaaacaacactgtgaccatacaaaactggaataccggttaccgtacatactatgcggttctactaaaagtcagctcggaaggagttatcgaatggaacaaatacatcgaaatagacaacagccccgaagcctccgctactcattacacagaaggtacaccagacggcatttacccttatgctaccgccaccgacgagaacgggaacatctatttagccgggaattatcgtaaaaccatgactttttacacggcagaaaattcgcctgtacaactaatccctcacaacaccgtaaactggaacggtgactctcaaaagacagtaggagacttgtttatcgtaaaactcgacgacaaagggaattatttgggccactttacaaccacagtctccggcacaatcgaaagagaacaaataacccatctcatctacgacaacggtaaactctatttctacggaactgtaaaaaacagtaacgaaggctcgatcaatttaggctcgatcaacctcgtgccttcgtcgttcgacgacattctcatcggggaaatcgataccaacttagacgtgaaatgggcaaaattaataacagcattcggagccagcgacagcaagcacactacccaaaccaagaacatggactatataaacggaagtctttacctttcgggaatgatgaaaggagggttcgccccttatggagaagaggaagcccgaatagcctctaaatctactccgctcaatgggtttgtaatcaaatgcgatgcttcaaacggagaatggttaggaggtgtctctgccgacgaacaaggtatcggtggttatttcggagtagccaaagggaaagaaaacaatctctatgcctacgggtatagctgggcaacccctaataaaggtatttgcctaaccacgatagatgaatccagttggaaaaaaacagaaaagatagccctcataaccgaaaccggtatgggtacagcttggagctgtttggcagacggtacaaatttctactccttttcaagaggtaataaagccgtcaatttctataattccgaatttaccttacctgcacccacaggttggggaatgttcatatcgagctggaaactcgacgatatagccacagggatagaaactccaaatttagccggaaacgatacacgaatatacggagtgcaaggaggagtagtcgtcaataccgaagaacctatcgatgtgtatatctacaacatcaccggcgcactggttaaacaaataaaagtaaccggcaacgaaacaatagaacttcccaaaggtatatatatcgccaataagcaaaaagtcatggtttactaaatcatggtttatgaaatgtttatatttatagaacggtggcgcatgccaccgttctttttgcatcaatcgaacaaaccaaaaatcccgaacagaggaaacctctgcccgggattgggatcgcatatcctacctatctaataacttatcgattattctctttatcgattgcggctaaccgtgcatacatttctaccatagcgaactgtgtcaacagccacttcgaatcgtttttcgtttttccgctccaatcatcgttaaacaatccgtttttctcacgcatttccgtccaagcgaaatccagattttccctaaaagcatcgatatacaaactattatgatctataccatacagctcaacgaatcccctaaacataatagcggtaaaccaaacatcaccccgattcagtactttatatttacgacccgactgcaaatcgtggctaaaaaaccgattgtaacaagcagcagccagccgttgggcatcctgcaaatattttttttcacttgtgattcgatacaaaagcgctgccgattgcatcatttgtccactgttataagcaaacttcgccctaccgatttctccgttcaaactcttattatcgaaatataaaccgtctgcgggatcttgcagattttctttcgtccactcatacaatcgaattcctgcttgcaaataagaactatcgccggtcgctaaaaagagtttcgaagcatacaccgaacccggagcattggaacaggtatttttcccgttctttttctgttcgcaccaatatatgccatatcccaatttatcatcggttccactttctataaaccgccaaaccatcttggcttgtgaaagatattcttttttcccggtcaacaaatacaagtcggtaaaatcgagccctatccaaatattatcgtcatagaatctatcggaaaccggagccgtgtttatatacgaagcatacgctgtcggagtcctccgcgtgtcgagatacatttccagtccgggacgaaccgttttagtcaacacttttcggaaatcggacttcggttttacttctagaagagccgtaacggccgacaggctccccgaaaaaggccacagataggaataaagtttctgttgctcggcctgttcttgattagaaagataggagactttcaaatggttgtcaaagggataagtctccctgaataaaggaacatcttcaactccataaagtttttcaatggccttgaacgtatcggccgcacgagtatagttatcgttctctgcaaagctttttcctgaaaagaacaaaagaaaagcgagcgcaaagcaacgaccaagcataattgagaataatttcttcatacgattttacaattttttcgggaaatttccgttccccggctttttccatcgatataaaaacgaacaaaaaaaatcaccgagcagaggacaatccccagcccggtgaaaaacataaagatattatttaactattactttattggaatatacagcgttaccacaatttatccgaacaacataaacaccgccatgagccatatcgaaagaacaatcggaatccgctgctgtcgaggcaacacaattgcccaacaaatcgaacaccataacgtcatcgacaacagcgccattggtcagaacctgaatagtcgacccactgactgtcacaaccggcttgacagctgccgaaacttcctcaatagcagtgggatcgccttgttctaccaacagagtcaatgcattgagatcgaccgtcaacttgtaatagccatcagacggaacggtaaacttattgtcatggttaccggcagtaaaataggaaatggtatacgtttcacctaacgtaatgagctgatttccatcttgtgtttgatcgaatacaaaacagttttcccaatttccggcaataagttgattgataaatttgaattccgtatcacctccttcggagttcttagcatacaaaaatccattccatgtaaacacaccttcgcttactcttgtcatttcaactccgtcctcggttttccaagctcccggttctcctttcatggcactaccgatcagatataaatgatcatagtcgatttttgtaacctccattttcacggtattcaaatcgatcgtaatcgtataagtagccgtagaagcaatttggtactccgcagtggcgacttcatcggcactgaaaaccggtgcataagaaccagatttgacttcagatgcattcgccggattcaaggattggctattgtcgttgcttacgatatagaaaccggtcacgggatcttcgacttcaagttttcctttccatgtatagacaccgtccgattctttcgtcatagcaactctttcggggaatgcgctaccggctaaataggcctgtccgaatttctcgacatcaagaacgtccaaagagccttctgtcaaagtcatcgtttctgcatccaaatcgatcgtaatcgtgtacaccccggttttttctacttggaaagaagtgtcatagccaccgtgttcgcctttgtcatacaactttgcaggaacacccggagtaacaacttcgtgatcgggcacatcgggattaggtgcaagacaaggatcccagcctcttcctaccaagaatttgaatcgacggtctcccgttttatccaacaactctcccgtccacgtaaattgaccgtctccgaccttcgtcatttcaagagcatcgtcaggactccaacctgctgcacaagcatctccgacaacatacaaattgtcataatgattgatagccgacataccgaatacggccaacaaacacgcgattaaaaatgtaatctttttcataagtttttattattaagtttaacaaaagaatctactttactgacctatcaatacctttttggtaaataccttatcctctgtatgaacctttacgagataaacacctttctcatctaccgacaaagaagcccgaccgccgtcgaaactcccttctttaagaatttgtccaagtgaattatagacccaataatcggtagaagaagactgctcgataacgatgtgtttgtcaagagcataaacctttcccacaggctcggtactttcaggggtctcgatatcggtagtaccatcggcatatttcgacaaagtaatgcggtctatattaggaccatactccgaattattcccgatttctaccgtattgcttatcgtatgatcgaggtctacccatatagttttatgagccaaattaccgccgctcgttcctcctgtgccgacaaatgagacctcttgccaagaatccatattaccgttcatctttacataggccgtacagggagaatcggacatatagtaaacagtcatcgcataagtgcccgattcagggacttttacatcgttaaacgtaatggagcgtccattacctatcgaagccacatatttcccacccgaacataaactatctgtatcagtcttaaccggtacaccgaacggaatcgtattgccatcggcctcagcctcatatttcatcaaaataggtttaggaagttgcgaagacatagagaacaaaacagccgttcccccatgttttaacaaatcgatcgacaccgtatctttcgatgttaaattttccttccattcgaattgaatttccgacggacattccccatctttataaatgtacgcattgtatcgttcaccggaggataaaaacgaaagaggcacggacacggtacgagcatcgtgtgtcagcgaagcgaaataccactcattacctttgcagcgtacgatacttacatattcgtcgggaacagcttcaagacagcgggtatcgtcccatgcagccggtacagtctttaaaaattcccgagcaatgttatattcgatattttcgggagcatcgccgatatgttgtactcccgattcaaaaactaccgataaagccaactggtgcgctgctgtcgtcttttgatggatgcacccgtttttatcggcaaaatctaccgggacataatcggtcgacccgatagcccctcggataatcgccgagtttatattatggatatcgggaaaagtcgtaaaaaccgtattctccaacacggcctcagatgtcagcaaatgcggccatgttctcctcaaaccggtcggcttagtacaggcatgtaaattaagcaacaattgcttttcggccgttaccttcaaaagcgaatcgtatttcttcatcatagcctgatcgtcactttcccaaaaatcgactttcaaccctttaactccttgcgacttccaattctgtaccatagaaaccatcgccgactcatcggaaggaagcgagttttgattcacccatacgaacactcccaccgatttggaggatgcataatccactacctctttcaacgaaacaccgttctgctcccagcatttgtccaatgtgaaatattcccaaccttgctgtttagcccaatctatatatttcttaatgttactcatgctaagataatcggagtggaagtcttctccgccgaaattccatacagcacgtccgggttttacccatgacagattagtcaaggccgttttatcgttcaaattttccaatataaccgactctgctatcgattctaaggaacccaccatgagaactctccacggcgtatacaagggaagggtagcagcgacattccccaccagccggtaaccgtaggatttcgtctcttcattcacaaacaacgagcttccacaataattcccattgaccatcgcttcggtcaacaacagataatcgcttcccgtatgaaccagcaatggcaacggggtatatagttcacatgccataaattctctatcgttctcttcataaagagcctgattatttttggtatattgctgtgaataaactttttcctgtcttaccggcaaacattcgctattttcggcataaaccgaaatgtctccgctaccgagaatcgcatagcggtaagccacgccatcgtcatacacccgaaaaataaattgtacggtatgtccgtctttattacatgaaactgtcgcctctttatatgtattatcatatcgactgcgctttcccgacggtaagctatacgaatcgtccaccaaacgttcggtaaaagagggttcgctcaatcccgttgaaaaatcgcctaccgaagtggtaattcccaaagccgatttttccacaatagaggtaacccctttcacaaccttataatacaaagcatcgttatcgctcacgacaacaagttttatagaatcggagggagagacggtttctccgacgacagtctcaccccataccgggcaggctcctgccatcatcgcgccgaccaaaagaccatatatacatttatttttcattgtcaatatttacttcctgtttctacaataaagctacttcacgattactttttgcacgactcgttcttgctgtacaattacccccaccagataagcaccgggcggaacaggtattctattcacacgacctgctatttcactctcgtacacaatttggccggacaagttcactactttacaaaatccatcggaatccatagtaattacaatttcgcgattctgcgtagcgacatcgattccttcggctaccggttttgtaacagaagacggtttgtcactgccgaacagttgccatttcaaaagctgaaaagaatcggctccgttattttcgatcgtcctcaaacgatagcctttatataatttagtaccatttactgcaaatttcatagttgcataccggcaagggaatacaaatccattgacttcgcttacggcttcccagtctttgtcaaagccttcgacaacccaactcttagggtctctctcgggataatcctgacacgaagtcaacgtataatagtccaatcgatacggtttatctagttctacctcgacattgaataccgggctttcgtcactataatacttccgttccatatcccggtcgaaaagattaaaatatctttcatcggcaatcgtaaaggctccgagcggagaacctatcacattggaaaagacatcgacattttcggtaatatctgccgggaaatttttatgatcggccgattcgtaataaggtatcccgaacaattgtatttccccgacattccgccctttcgtatcgatacgataatatcgggctgccttgcctgcatccgcatggggttgacggcttatcgtaaacaaggtagccgcgctgtaacgggtagagcctccggaattcaattgcgagtaatttctcccgtcgaccgaatattcaaggctccatgaatcgacattttgagatgtcacttctccctcggaaaatagataacccgtaaccagacaagggtctgtacaggtaacatatatgtaatccgaagcagcctgtaaatcataaaccgtgtattcatcgttatcattcagggcagacccggaaatatcttttccaccaatcgtgattgcagcattgtcggtaaggtcgtaagcgtaagctgctttcatcttttcgggcttcggcattttaacctcggtctcccagatttcaaatttatctatattagggccaccgccattgtaaggagtgatttttatcgtattatcgcccttatcgagataaatatacgaaagcatcataccgaccggagggcggttccaatcttctgtcgtctccgtcatacctatcaccaccggtgcataaaatcccgtttggacggctatggaacgtatgaacatgctcgtgtaataggtacggaactcataagtgccctccttatcgacatagacattcctaaacaaaatctcggatccattgtcgttgtcccccacataggcatctcccgaatatccattcacatatttgacctttaccggaggtgtgagaaccgcatcctctgcttccaagactaaaagcggattttgagcgcacaagccggcagcaggcaacaaagagagtaataaaatcttaaattttttcattccttcgcaaactacaattaagcataagaaccacttagaatctttcctaagccaaagattccaacagggatatttcacagtcgaaaaggatagagaaacaaccgttgtccgaacaatatatgtacttacacgagtttttcatgttggtaacattccaagggttttacatatctatgacacaaaaaacatcatacacccttataccaaatgaaaaaaaaattttactaccacaaatagctgtactgatcgcctaaaatttttttgatttttttcaaggccgtggttatctgaccctcaacggtttttaccgaaatattcaacctccgagctatttcctgattcgtaagattctcacttcggctaagcaaaaaaatgttccgacatttgtccggtaaagaaaaaacagcctcctgaatcaaacgatataattcctcggtttcaagagtagacacactggtattgatcgtagagacttccactccgtcgagacctaccgtctctttcttttttctcaattcattcaaacacttatttttcgctgcttggaacaaataggctttcagtgaaagctgtatctgaaatgtctctctgttttcccataaataaataaaaatatccatcgccaactcttctgccacattcttatcgtccaagtggagatatatgaaacggcacaaaggagtaaaatatgtttcaaataaagatttgaacgcatcctcatttccttcacgaatttgcctaagcaatgatatgtcattagtgatattcgctaccatcttcataggaaaactatgcaaagaaaataatattattcaagataaaaaaataatgttcgcagcaaaaataaaaaaatataaaagtctcgaaagatttctactccctgattacaaagtaattataaaatggatacctataccaatcagacattttttcttttttattatctacacatataagggtcaagcccgatttttgtgtctaagtaattgaaatcttaaaattccatcaaacatgaataataatcttccgtgggatataatcatcgctaaattcgaaggaatctccctatcagaagaagagcaatcgcagctacaaaactggttagcggccgatgacaaaaacaaacttcttttcgatgaactgaaaaccctttgggatagcatccaagcaaaatctgccaactacaatcccgatgtagattattattggaaaaaattccaagcctatattcacaaagatactatacagaaagaacctataaaggtaaaaaagattgttccccggttacatttcggcaagaaactaaaccgcattgccgcagctgtcagtttattattaatcgtttcggggatagggtattatttcttttccagcaacaaatctttgaacagagagacaattgtccaaacttattcgacaattacaggaaaatcgaaattcatacttcccgatggcagtgaagtatggttaaattcacattcgaagctggaatacaaaaatcttcatgccgacatgcgagaagtcgaattgaaaggcgaggctttttttaaagttcagcacgatgaaaggccgttcattgtcaagaccagcgacatagcggtaaaagtgcatggtacgcaattcaacgtaagcgcctaccatgctgacgaaaaatcggtagtgagcctatacgaaggttcggtatcgatgcatgtattgggcgacgatagctcgaattgttacctgaaaccgggggaagaaggctctctcgacaagaaagacaaaacgattcgggttgaaaaaggagacgtagaatttgcaaaaatgtggactaacgaaaaagtcaaactggaaaacaaaaaccttcatgaagtttgcaaatatctttccaaatggtataacgtgaaaatcatcatcgacccggctttgtccgacgatcaatcttacacgtttaccctccatgaccaaagtctcgaagatattattcgtatcatgtcgaacatatcttcgataaactaccactttacagaagacaacacattaatgataaccctttaacacattattgcctatgacgatacattaaagacaaaccacctatgtagaatgaatgattaaaaatttttattcttaaacccaaaaacaaaaaaaagaaagagaacttattaagttaactttaatatacccatgatatgaatctaaagaaaaaattggctgtatttctagccattttattctccttgaacttgtttgctcaagcaccgggagaaaccataacaatttcttttcaaaacattccattatccgaggctatcaaaaaaatagaaagtgtaagtaaatacacgttcttttacgatgccttaaaattgaatgtcgatcaaaaagtatcgctgaacgcccaaaagacacctattcaacaagcaatatcccaaatgcttggaaattcgggtattaaatttgaaattaaacagtctcaaatcatcttatataacaaaaacgtatcctctgatgaaaaaaagatttccatacgaggaaacgttacagatgtcaacggcgagccgcttatcggtgtaaccgtctcggtaaaggacaatccctctatcgtgactatcaccaatgtagatggtatctatgacataaaagtgcccgataaaagtgccatactacaattcaaatacatcgggttcgcttctcgtgaagaagctgtgaatagccggaaaattatcaatgtggtgttacaagacgcagcgacccaactcgaagatgtcgtagtcgttggatacggtgtacagaagaaagcatcggtagtcgcagctatcaccagtgtgaaacctcaacaattacaagtagggacgactcgttcgttgagcaacgacctcgccggtaacatcgggggtatcatcgccgttcaacgttccggtgaaccgggttacgacaactccgaattctggattcgcggtatgagctctttcaagggcagcaactccccgctcgtacttgtcgatggtgtagaacgctccttgaacaacctcgatatttcggaaatagaatcgttctcggtactgaaagatgcttcggcaagtgccgtgtacggtgtacgtggtgcgaatggtgtaatccttattacaaccaaacgaggacattccggtaagacgaacatcaacgtatcggtggaacactctatcactcgtccggccaaattaccctcgttcctcaatgcggcagattaccttacgctcttgaacaatatcaatatccaagagacggggacagaactttattcgccggaactaatagataaataccgcagcggatacgataccgaactatatcccgatatagattggatagatgcaattacaaaagacgtcgctcacaacacgagggcctcgttcgacctttcgggaggtaacgagaaattgcgttactctttcgtcggcgcatactataacgaagcaggtattaccgagagcgacaaaactcaaaactggaactccaatatctcggtgaatcgattcaacttgcgtaccaacgtagacatgaacgtcacctcctctacattattgacattcaacatcggcggataccttcaacagagaaacgcaccgaaagatggtatcgacgatattttcggcgctgcattcaaagctacgccgtacatggttccgctgatttatgaaaacggggcccttcccaaacctcgtgaaaatgaaaacccgtgggccaaactgacacaatcgggtttcaaacgtgaggcagaaagtaaactggaaaccttgttcgccgtggaacaagacttaaaatgtatcttacccggtttgaaaataaaaggtatattctcttacgactactattcacgaaacggagtaaaccggggcaaagctccccgttactattcgccggccacgcaacgcgacccggtgaccggagagttaatactgacggttctgagcgaaggaggcgaattcttgggctacgaaagatgggaagactatggcaattatagcacctacttagaaggaaatatcacctacgaccaacgattcggaaatcactcggtaagcgcattgttgttgtacaaccaacgcaactacgacgacggtgaccaagtgccctatcgtacacaaggtttcgcaggtcgtgcggcatatacatacgccgaccgctatatcgcagagttcaacttcggttataacggttccgagaactttgcaaaaggcaaccgtttcggtttcttcccgtctatcgctgcgggctggattgtttcggaggaagaattcatgcgtccggtacaaaactacatcaataaattaaaactgagagcttcttacggtttggccggaaacgaccgcttttataacgacgacggttctcaaaaacgttttgcctacatcactactatcggttcgaccgacggctacaaatggggtaactccaatgctttctacgaaaaaggaggtttgcgcgaaggtgatcccggtgttgagtccctgacttgggaaaccgtgaaaaaggccaacgtcggaatcgaactgggcttgttcaaaatggccgaattgcaagtagacttcttccatgaaagaagagaagacatcttcatgcaacgaaagaacataccgtcatcggccggcttcccctccgctccgtgggcgaactacggtatcgtgacaaacaaaggcttcgatatttcattggatttgaacaaacaaatcaacaaagactggtttatttcggctcgggcaagtgttacctacgccaagaacaaaatcatagaacaagacgaagatttaggtgtactcggcacttaccgttcgagcaccggcaaaccggtaggccagattttcggtttggttaacgacggcttatataccgaagccgatttcgaagacgtaacgaccggtaagttgaaaccgggactgccggttccaaaattttcggatagagtttatcccggagatataaagtatttggatctcaacggtgacaatgaaatcacagaaaccgataaaaccgccatcggaggtacggtcaatcccgaactcgtatatggtttcggtattaacctgagctataaaaatatcgatttcggagctttcttccagggaaacggccgcacctatcgtatcatcggagaaaaccaaaagaacttcttacccggttctaccatcggagccgaaggtaacatattcaccaatgcatcggatgcatggacagtcgacaaccccagtcaggacgtattctatccgagactccacatgggttacaacgccaacaacgcccaagtatcggattggtggttgaaagatatgagtatgttgcggttgaaaaatgtagaattgggatattcattctcaaaaaatcttatcaaaaaagctgcaatggagtatgcccgtatattcgttcgcggaacaaatcttttgcagttctccaagttcgacctgtgggaccccgaactgaataccagcaacggtttgaaataccccatcatggccacttattctatcggactacaagtaagattctaaacctattaatataaaaattatgaaacatacaatcgttagatatacattagctatcatcggtctgttttcggtcacttcctgtaccgattatctggacaatgctcccgacgatattttaacattggatatggtattcaacagtaagaaccgtaccgaggaatggttggccggtatctatgacggaatccccgacccctacacgcccatgatgcgtaattacgatgcctatgccgatgatttctcgccttcgcaagactggcgggcattctccgactgggattgtatcgacaaaatcttaggcaactggactccccaaagcgagtggaaggggaatttttggagcgactttccggtgagaatacgcgaggcttacattttcttagacaacgtcaaggctctgcccgagcaagaggtctatcaagccgatgtggacaacatgaaggccgaggcacgtttcttaattgcctactactattatctgttggtgaatacctacggagccataccgttccaaacttcactggtcgacatgaacgaccccatcgacaagatattgatagggcaaacaccttacgaccaaataatcgattggctcgataaagagttcaaagccgtatcggaactgttaccaccctcttataccgaagaacgtaaatacggacgagcaacctcggtgatggcgttggctatccgtgcccgtatgcttcttttcgctgcaagtccgttggtaaacgggaacgatgatcccgattatgccgcttatacgaacaataaaggtgaagcaatcttcaactctacctacgaccccaagaaatgggaacgtgcggtaaacgcttgcaaagatcttttgaccgaggccgaaggcaacggttatgccttgtacaaagagtataacggagatggttcgatcgaccctttcatgtcctattccaatatgtgttacaaagaattcaatcaaggtaacaaggaaattctgttcgcccgtcccgatgtaagttacgacctttactctcaacactcggttccccgcggatcccgtggacaaggcggtttgggagttactcaggaattggtcgatgcgttcttcatgagcaacggtctgcccgctatcacagggtatgagcccaacggcgagcctatcatcaacaaagcctcgggatacaatgaaagcggattctctacccagcccgatgtcagaaagaccaaatggatcgaaggagacaaagatgccaaagaatccaacgccgaaaatacaatcgctccggccggaacattcaacatgtatgtcaatcgcgagcctcgtttctatgtatcggtgctttacaacggtgcttggtatcgtcaatcgagccgttatgtggatttctattacgcaggagaagacggccggcccgcgtccggttctttatgggatgctccgcaaacaggttatctgttgagaaaacgcgtacaccccgaaacgaatatcctcaactactccattccctatcgtcccggtattatctgccggttggcagaagcctatctgaactatgccgaagctctcaacgaatgggctcccgagcaaaccgacgagatactgaaatacgtgaacctcgtaagagagcgcgcaggtatcccccaatatggaacagggaaagacagcaacggattagacaaaatccccgcaccggccgatcagaccgctatgcgtgaagcgattcgtcgcgaacgtcgggttgagttcaactgcgaatatgcgatccgtttcgatgatatccgccgttggaaacaaatcgatattctgcgcggtgacttctacggcatgaacaagttcgggacagaaaaaagctgcgacaagaacaacgagaatgcctacttcaaacgtcgcgtcgaaatcacacgcgctttcagcgaaaagaactattggttccccattcatcaaaatcaattggacaagaaccccaacctcagacaattacccaaatggtaaattcaattttgaaatctaaaagtataaatgtatgaaaacgatatatcatatattattctcgcttctgttcgtactggcttttgtcggctgcgacgatgacgacgataaagtcatagagcggaatcaattgaaattgacagcctccgcccagtcggtgacccttactccggatgcgacagatgacgagattatttcgttctcttggaacgaagcgaccagtttaggggcagactacactttctcctatctgtttcaaatagatatagcagacaacaactttcagtcggcaaccgatgtccgcacattcggacccaatgaatcgatcagctactcatcggccgaactgtacgaccttattgtagaaaaatggggaaagacagccggagaagcagtctatgtggaggctcgggtagccgccaaagtggaaggtcccaaattcaaatatcccgaaatagcgaccacgaaagtgcaaataaccacttataagcctacatcgcaaccgttctatattacgggtacggctacgaccggcggcacggatctgaatgccgctgagaaaataaccgaactatccaacggtcgtctgtataattggagaggccagttgaaacaaggcggattcaaattcatcaccacgctggggcaagccttgccttcttacaacaaaggagcggacaacagctctgtcgtaaaacgtacgagcgaaacggaagcagacgacctcttccagataaacgaggctggattgtattacatctacctatcgcttaaagatatgactatctcatacaagaaacttctatatgaaaacttatatcttgtaggtaatgcgactgctgccggttgggatatagaaaagattatcgccatgactcccgataacttgaatcctaacatctttacttaccagggggctttgcaagagggagaattaaaaatcctcgcccaaaggaagttcgacggaaccacgttcaaaccacttgtcgaaaacgggtctatcgaaagtaccgatgtacaagtgaccccgggagaacagcccgactacaagtggaaaataaccgccgagcaagcaggtctttacaagatcacgctcgatacggaaaaaatggaaatcaaatttgaaaagcagtaatcatgatcgcgctactattcggaaaattccgaatagtagcgtcgaccaatgagtctcgtcaaattcgttaaaacatcacacaactcatcatgaaaaaaaatttattagcactcgctttccttgtcggactactgacttgctgtaaaagcgaagatgctcccatcaaacccgtgaaacccactgatccgggaagtatcaataaggagtacatgtcgcgagccgaaacgacttttgccaatattttcaaatattattggagcgacaaagtgcgaatgatgttcggctcatatcccaatacattgggaactccccaagaaccttccagccccgactacgacagtcacgcttacttatggggattgggtagcgtcgtttcggccttcaacgctatcgtacaaaataccgataacgtagatttccgaatgacctacgaaagccggttgaaagagacactgctcaaatactacaatacgacaaaagaacccatgtgtttcggctgttttgtcaaccctcacgatcaacgtctatacgacgacgctatttgggtgggtatagatttagcggatctttacagtaaaaccaaagatagctggtatctcgactatgcaaaaagcgtatggaatttcgtactttccgggaaagacgatgaactcggaggcggagtttattgggacgaaaatgccaaagactccaaaaacacttgttccaacgctccggccgtggttctcgctttgaaactctatcaaatcaccaacgatgcagcgtacttggagaacggtaaagatatttacaaatggacaaaatcgaaattacaagacccctccgactacctctactgggattgcatcaaaacgagcggtaaaatcgaaaccagcaagttctcttacaactcgggacaaatgttgcaagcagccgtgttgctctacaatgcgacaggcgaggaacaatatctcaccgatgccaaattgctcgcagaggcttgctataattatttcttcgaaaacttcatatccaactcgtcgggagagcaattccgcattctcaaagacggaagtcgctggttcaatgcgatcatggtccgcggattcctcgaactgaacaaagtcgagagtaatggaacttatatgatcgccatacgcaaatcggtcgaccacgcatggaaatacacccgggatgccgagaccggacttttcttcaaacaattcagcgggaacgacataacggacaacccgggagatattcttgcacaaggtgctatggttgaattattcgcaaaattagcagttaactaataattaaaatttttatccatgaaattaaacggaattatagtcgctttatgctcggtcggaatcctcaatgcacatgccgaaaacgtagctatcgccaaatcttctctcgtgggagacgggatagtagaattcgttccgcaaggattcgaccaaacgaaaaccccctctttaattcttaaagaagaacccacggcaaaagggtctgtaccctccgattgggaattatatccacaattcaccgtcatggacggaaaggccaatgcctcattgggcctgaccggtgaaataagtctgtatggcggtggcgaggttaccggtcctctattgagaaacggccaatacataaaactctggaacaccgatacgggagcctacggcgtcgatggcggcaaacggctgtatcaatcacatccgtgggtattgggcgtgagaagggacggtagcgctttcggtattttgttcgacagcagctggaaatcggaactgcataccaattccgacaaaatcgaatttaacacagagggagctctattccgcatttacatcatcgacagagaatcccccaaagatgtcctcaaaggccttgccgaactgaccgggaccatcacgatgcccgcccgttggactttgggataccatcaatgtcgtttctcctacggcagcgagcagaaagtacgggaaatcgcagacaacttccgtagcaggaatatcccttgcgatgctatctggatggacatcgactacatggacggataccgtattttcacattcaacgaaacgactttccccgaccccaaagccttgaatgaggaacttcatcaaaaaggattcaaagccgtatatatgatcgatcccggagccaaagtggacaaaaactaccacgtttaccaatcgggaacagaaaacgatgtgtgggtaaaacgccccaacggtgaaatttacgaaggtaaagtatggccgggatattgcgcattccccgactttaccatgcccaaagcccgtgaatggtggtccaatttgtataaagatttcttggcattgggaatcgacggcgtatggaacgacatgaatgagccggccgttaccgacgacgatattcccgaagaaaaccgcattggaaccatgccttacgatactcctcaccgaggaggcggcaatttacccgccggccctcacctgctctaccacaacgcctacggtcgtcttatggtcgaagcctcgtatgaagggattatgaaagtcaaccccgaaaaacgccccttccttcttacgcgtgccggtttactgggttatcaacgatatgcagcaacttggacaggtgacaactgggctggctgggatcacttgaaactttccgtacctatgtccattacattaggcctttcaggtcaagcattcaacggtcccgatatcggaggattcttaaataatacggatgccgatttatgggctcattggttgggattcggagtatttttaccttttgccagaggtcatgcttgtgcaggaaccaacgacaaagaaccgtgggctttcggcgaggccatagaaaacacctctcgtattgccctcgaacgtcgttaccgattgcttccctatttctacacgttgttctacgaagctcacaagacaggtgttccggttatggaacctgtatttttcgccgaccccaaagacctgagattgcgcagcgagcaacaggctttcctattgggagacaatgtccttgttattcccgctttcgccgagaatcccgtattgccttacggaatttgggaaaatatgacactgatcgatggagaatacagcgataagtaccaagccaaattgaaaatcaaaggcggaagcatcgttccggtcggaaaggttatacaaagcaccaccgaaaattcgttcgaacctcttactctttttgtatgcctcgatgagaacggaaaagctcacggtcaactctattgggatgccggagacggctggaatttccaatgcggagattatagcttgatgacattctctgccgagaagaaaaacaatcaagtaaaagtctctctcgcttccaaagagggtaaacgtaaaatagagaaagaaatcaaagctctgaatgtagaattaatgatgaacgggaaagtatataaaggttccggttcgttgaaaaaaggtgtaacaataaatctttaaaaaatgaagagagtgcatcggtcgatgcactctctctttactaaaacttttttatcatgaaaaacagatattccatctggcgactaatgtcgttaggagctgctttaatgacggctccgtggctacaagcccaagacgtgcttgtaacgctcgaagcagaaaagggaataatcacactgcctgcaaaagtaaaacctgtcgacggtagtaccgtagaaggaatctcgggcggtaaatatgtaggtgataacgaccccggtagctccatagtttttaacgatgttgaagtgcccgaagccgggacttatgaattcaaaacttattacatgagtatgcagaataggtctattgccgttaaagtcaataactattccgaatacatatcgacggtctccaatacgacaccgggttgggacgtacctcccacaaacgaaatgagtacctatatctacatggataaagggaaaaatacgataaaaattactcctatgggaagcggtggccctaatatggataaattcgaaatcattacaaccgatgtagagcttccgaaaccgggagagtttcctatcgttctcgaagccgaaaccgctcaattattcggaaacctgaaagtaaaacctaccgacggttcttccgttgtcggtctatcgggaggcaaatatatcggagacttcgacttagccgctaactcctatttacggttcaacaacgtcgagatacccgaagccgggacttacgaattgaaagtctattcgatggggtcgagccgagctctcaccatcaaggtcaaccactatcaaaaaagtatcattcgtacgaaagactcccccaactgggacaatgcccctacctcaatggtatctaccttgatatatctcgataagggaacaaacaccctgactttcggactacacgaggacaatggccccaatatcgataaattcgagatatgtacaacgaccgaagaaatagacaaaccagaagtcgagaaaatcgcttactcgtatgattttaccgacgaggccgaaatttcttctacacaagaaaattctacgctgagcttgttgaccgataatgatgaatacacttattatgttcccgagacatcgaatgtagaaatcgtagccaaatgccagcaaccggtactcttgacgggattcttactctcagcaggtatcgacagtgaaatcgacgttgacacttggaaattatatgcttcggccaatggctctacatggaaagaaatttcttacgataaagtaaccgatctcgacggagcccacctatatgaaataacccgatatccgggaaccgcagcagcagacgccgcacaatattacaaattagcggcaacccacgaaaatctcgaaattgcagaatggcaattgttcggtctgccctatgtcgcttcgggagacaaaaattttccgaccgacctgactgaaaatatcgatgtccgctccaatgtatcggcatatcctatcggagaatcgggtgataatttctccgaagaattttacaatctgttcgaccggaacatgagcaccaaatattatgcacatgaggcaacgagtttttatgtagaaatagatttggaaaagccctatacgatcgaatcttatgcccttacaaacgctcatgattatcccgaccgggatcctcgcaaatggattttaaatgcttataacgaagaattgggctgggtagaactcgaccgtcagacagacacatacttccccacccggtattctactttgaaatataacgtaaactcgtccacgggattcaccaaagtcatgctcgacgtagaagctaataatggagcaaaagacattcaactccttaaattccaaatcttcggtaaagaatttaacggagccggcatcaacgccgcccaggacaaaacactttccatcattgcggatcaagggaaaatcattatttctcaaacagagggcaaaccggtaaactacacggtatataacctgtcgggaacagtgatcgaacaaggtacgactgatgtttcataccgagaaatcgtactgaatgccggagcatacattgtatcggctaatgacggaagtaaaaataaaatagaaaaactaattgttaaataaacattgaaccatgaaatccagaagatataaactacccttgatagccttatcgctatcattagcattaccggctttctcccaatcgtggtttactcccgaagtagaaaaaagagccgaggatattttaaaaaatatgacagtaaaagaacgcctgacctatatcggtggtatagattggatgtacacccgcgctattccccgattaaatgttccggctataaaaatgtccgacggaccgcagggcgtaggtacatggggagcttccacggcttatccttgcgatcttttactggcagccacatggaatccggatatggcctatgcgttcggcgcagctttggcacaagactgcaaggctcgtggtgtaaatattctattaggtcctgccgtaaacatcgcaagagctcctttctgtggtcggaacttcgaatatatgggagaagaccctttcttgacggcaacgacttctaccggatatatcaagggattacaagaaaacggagtgatgggagtaatcaaacacttcacggccaacttccaagaatatgaccgtaattatgtgagttccaacattgacgagcgaaccttacatgaaatctatttcccggcatttaaatcggccgtccagaatgcagaagtcggtgctgtcatgagcagttataacttgctcaacggcgtatggacaaccgagaatccctggttgctcaaagaagtgctacgggaacaatggggattcaacgggctcgtgatgtccgactggggctccactcataactgtgttccggcggttaaaaatggactcgatttggaaatggcaggaaatgaaatcgaaaacgaggaagctctgcgccattatctcgaaaccggagaaataaatatgagcgaaatcgatttgaaagtcaaacatatcttacaaacgatgatcggattcggattcttcgacaaagaacaattagatccgagcattcccctcgacaaccccgaaacggcaaaagccgcattggaaatttcgagagaaggaatcgtgttgttgaaaaacgaatcgaacattctgccgttgaacgccaatacgattaaaaacattgccgtaatcggtaataacgctacaatttatgcggccggtggcggaagcggactggtaagacctttccattatgtgtcttacttcgacggattgaaaaagctggcaaatgaaaaaggcatcaacgttacacttgtcgatctctatgatcacatggaagatgttctgtatacagctgccggctcgaacgaacatggtctcaaagccgaattttacaacaacgagaatctatcaggaactcctgtaactacccgcatagacagtcgtatcaactttgaatggacctcgggacccgatgctgccaatgtcgagaaaaactatttctcggtcaaatggaccggtgaaattcgtcccgaagaaacatcgaactatactttcatcgtgaaaggagatgacggtttccgtttaattctcgatggaaaaacggtcatcgatgaattcaaatcgggttccactcgtgaaaaacgttataccatgaaaatggaagcagggaaagcctacaaaattcaactggattattttcagggaggaggcggagcctgtatcgatttggcatggctcaaagacggagatgaaaaccggttccaaaacgaattggacaaagccgacataatcgtcgcattcatcggtcacaattcaagtagcgaagccgaagccggagaacggtccttcggattgccccaagatgtaaaggacctcgtcctagccgcccaaaagagctccaaaccgatgatcggagtcgtcaatgccggcggaaacgtagaaatgcaagactgggaacctaaaatgaaaggtctcctttggggttggtacggcggacaagaagccggaaccgcgatggccgaagtgttattcggagagtacaacccttcgggaaaactccctgtaacatttgaaaaaagatgggaagataatccctgttacaacagctattacgataatgggaccaaacaagtgaattttaccgaaggtattatgatgggatatcgtggatacgacaaagccggtacagaggtccaatatccgttcggtttcggattgtcctatacgacattcaatctttccgatatgcaaatcacggaatcttccgacgacaaatatttagtcgaagtttcttgcaaaataaagaataccggaaaggttgccggtgcagaagtcattcaactgtatgtaggcaagaacggcagcagccctgtcgaacgcccgataagggaactcaaaggctaccaaaaagtatatcttgaacccgaagaagaaaaattcgtgactttgtacctttctaaagatgcgttttcttattacgatgtcaatcggaaaaatttcgttgtcgataacggggaatacaacatcgaacttggattttcatctcgcgatataaaattgaaagaccaaactcaaatcaatgttgtttcggctattgacgaagcccgccaagataccgaaaaaggtaacttaattccctcggtggttaaacaaggtgaaattatcagaattgcacaaggctgtgcttccgaattaaacattttcgaccttacgggtcaaatgttactcaaacaaattgataaatgtacaatcgatacctcttatctaaaaaagggagcctatcttgctttgtataaaatagatgaaaaatttcatacgggtaaattcatcgttgaatagcttttaaaacttccagacaacaaagaggcccggaaatttaatttccgggcctcttcattttaattcgttcgttattcaaccgcccaaagcagtttctcaaactggcatttatctgggcaataattttactttcaatttcttgtatgcacgatcggccttcgctcgcgcctcctccaccgtatcggctgtcgccaaaatcacacctaatcgacggtgtccgacaacttccggcttcccaaaaattcgcatttgtactccttcttccgaaagaacctcatcgaggttaccaaatacaactttatccgtatctccttctacaacgatagcacgagatgccgatgggccatagaaacgaactccgggaacaggtaaccctaaaacagcacgggcatgcaaggcgaattgtgacatgtcttgcgaaatcatagtcaccattcccgtatcgtgcgggcgaggagagacttcgctgaaaaggacatcgtcccctttaataaaaagttctactccaaaaataccatatccacccaaagcatccgtaactttccgggctatatcctgagctttttgcaatgctttctccgacataacctgtggttgccaagattcccggtaatcaccatctacttgtacgtggcctaccggttttagaaaagtcgtcccggcagaatgacgaacagtaagttgagtaatttcataatcgaactgcacgaatccttccacaataacccgaccggctccggctcgtcccccttcctgagcgtagtgccacgacttatcgatatcatcggccgtacgcacgacactctgtccgtgtcccgaagaactcatgataggtttcaccacacatggcatgcctatttctttcacggcctcctcgaactcttctcgtgtagaggcaaatttataaggcgacgtaggcaatcccagttgctctgcggccaaacgacgtatgccctcccggttcatagtcaggtaggcggccgtcgcagtaggtgtaaccgaatacccctctttttcgagagccaccaacgtatctgtcgcgatagcttctacttcgggaatgatgtaatctggacgttccgtttctatcacttctctcaactttttgccatcgagcatagacaaaacatgactgcgatgagcgacctgcatagccggggcattggcatacttatccaaagcaaccacctccacaccataacgttgcagttctattgctacttctttacccaattctccacttccgcaaagcaaagctttcttaccgacaggagttagtaccgttccaatttctaccatatatacttgattttgtatgtgttattcatttatacaaatgtcttatgctaaccgaaaaaatgcaggctgtcctcaactatataccgagacataacctttctttacatcttatgcaaagatacaggaaaaatgaatggagtacaaatgaataaacagacttcctaccaacaaaaaacgggctttcgttttcgaagtccgtttcaattctttggaacacctttaatcttcgacatgggaaccgtcgcaaaagggctgattcgacgattttccacaacggcagataaacgcccgttgtttaataaccatactcccatcggagaacataattcttacatgcccaccaatacgcaatggaccgcattcgataacctttacgaccacctcgggttttatcggcacaatagatcctttcatagctgtttcttttttagttttatattcacttaaacagcaaatccggttcttttgtttattgtaccgttaaacgatcgaggcgtagaaaataatttctacgcctcgatctataaacctacgtatcactttattaaagcaatactacctctatgtctgcatctacttcatacatgctcactttaccttcgcgagccaaccagccaagggctgcatacaattctttttctttcagtttcgttgcttttttcaacccttttacagttaattttccggactcatttaaagcattccaaacctgtcctgcccatgttccaataacttctgcattcattcttttttacgtttaaattaaacaacttgaaaacacattgttttaatctggcacaaagttaatacatttttctttaattttaatgcttcaatgtgttttttcatattatctaccccctctacaaaagaaaaatagacattataaaaacactctacgggtgattttgtttgccccaatcatctatctccccaatataattttcaattcttctcttgccaaaaaagaaggagcaaattcttcacgcgcttgctccaataactgttgctcattctcatatcgagccgagaaatgccccaataacaattgctttacacctgctttacgagctataatagccgcttgccgagccgtcgaatggcaggtttccttcgcaagagcttcggcatcgtccccgaatgtagcctcgtgatacaacaaatctacaccttctatgatcggtaacaaagcctcgttataagccgtatcggaacaataggcataacgtaacggagggtctgccggcgtcgtcaaatatgagttgggaataattcgaccatcggaagtaacaaaatcttctcccgcctttatcgcagctctacggtaaaccggaacgttataaaaattcatcatatctcccaataaatgtcgcattcctactttctcttcaaaaaggaaacccgaacacggaaccctgtgtatcatcggtaaggaacgaactctaatagatttgtcttcataaatcacctccgttctattcggcaatacaggttcgaaacgaacagtaaaaggcaagtcccgacagaaaaaatcgagttgaggccgaaacacctgctctgcctgaggatgggcatgaatcaccagttctccggtcctacctactaacgcaaaagtcgaaatcattccgatcaaaccgaaacaatggtctccatgaagatgactcaaaaagatatgccccaatctcgtaaacttcaatcgcatgcgacgaaactgtatctgagccccttctccgcaatcaatcataaacaaattgtcgcgaatattcaaaatctgcgtactcggatagtgacgtgcggtgggcaaagccgacccacaccccaaaatatttacctcaaactttcccatttcaaagttcctttgacatttacaaagatacgcatttccacactttaacctgcacttttcataatgaaacaaaaagaccggcaatcttgccggtcttttctttataatacgcttttaacgcgccttattttttctctgcgtcgagtttctctttcaaagctgccagtgcatcgatatcgcccaaagtagttttttccatttgaggagttacgatagcatcgtctgccttagctgcttttttagcggctttcttagcagcattttctttcttagcctcggccttagcttcatcttcgaaaatacgactgtgagacaagatgatacgtttagcatctttgttaaactctataaccttgaacggaagtttctcttccaattgagcctgagttccgtcttgttttaccaagtgtttgggagtagcgaatccttcaactccataaggcaaagcaattacagcacccttatcgagcatttcgatgatagtaccttcatggatagaatcaacggtaaagataccctcgaatacgtcccacggattctcttcgagttgtttgtgacccaagctcaaacgacgattttccttgtcgatttccaatacttgaacttcgatgtcggctccgatttgagtaaattcagacgggtgtttgattttcttcgtccaagaaaggtctgagatatgaatcaaaccatctacgccctcttcgatttcaacgaatacaccgaagtttgtaaagttacgaactttggcatgatgacgagaaccgacagcatatttggtttcgatatcttcccacggatccggtttgagttgtttgataccgagagacattttacgttcttcacggtcaagtgtcaagataacggcttctacctcatcgcctactttcatgaagtcttgtgcactacgcaagtgttgcgaccaagacatttcggaaacgtggataagaccttcgacacccggagctatttcgatgaatgcgccgtagtcggccattacgacaactttacctttcactttgtcacccactttcaaatcgggatccaaagcatcccatggatggggttgcaattgtttcaagcccaacgcaatgcgttttttctcatcatcgaaatcgaggataactacattgagtttttgatcgagagaaactacttcttcggggtgagatacacgtccccaagaaaggtcggtgatgtgaatcaatccatctacgccgcccaaatcgatgaatacaccataggaagtgatattcttgacagttccttcgagtacttgtcctttttcgagtttggcgataatttctttcttctgttgttcaagctcggcttcgataagagctttgtgcgagacaaccacattcttgaattcttgattgattttaacaactttgaattccatagttttacctacgaatacatcatagtcacggataggcttaacgtcgatttgagaaccgggcaagaatgcttcgataccgaatacatcgacaatcataccgcccttcgtgcgacatttgatatatcctttgatgatttcgtcgttttcaagagccgagttaacacgatcccaagagcgggtagcgcgagctttcttgtgcgacaaaaccaactgtccttttttatcttcctgattctcgatataaacctctactttatcccctattttcaaatcgggattgtagcggaattcgctcatcggaatgataccgtccgatttgtaaccgatgtttacgaccacttcacgtttgttcaatgcgattaccgtaccttcgattacttctttgtcttttaccgtattcaaagactggtcataagtatttaccaattcatcatggctcttatcaccatacacttcgcctttttcaaaggcatcccagtcaaaattttctaccgggctgttttttagttcttcactcatgttaattaaataattgattttttgattaataagttagacattatatggtcttgttaaaatcggtgcgaagatacaaaatcttttcctctctgcaaattatttcaggaatataatctcctaacaccctttgacataaacatatattcatctctacaaaagattccgccatacaataaacagagtataattttgttttatttaaagagaatatatacccacccatgaacagacaaaagataacatggttgcaaatactccaaggttggagtatgttattggtcgtaataggacatgttaccttaaccggtattttcgagaaccctcaaactccggtgagcgcgacgatagagcgtgtcatatacagttttcacatgcctcttttcatgtttatctccggtttccttttttatttcacaaaaatcagccgaaacttagcctataaagaagttgtgttcgataagctcaaacggttgggaatcccctatttgttcttcacctttttcaccttcgccgtcaagtttatattctcaccattcatgaaacgcccggtagaattgtctttacgacaatttaccgacagttttctatatcccggctccaacccgttgagcgaaatgtggttcgtcgccacactctttatcatcatgctatcttatcctttgctgaaatatatgataacggggcatttcaaaattgcggtattaattatcggaagtgtcgtactcaacttatttttccctcccgatatattcttgctttgcctttccaatgtggcatatatgttcctttttttctgcttaggcatacttttctgcaaattcgatatacaacgttttttgagtcattccgggagtctcctactttcgctccttcttttcatcgcactgaatctgattcccgactgcccgattttgctgttaaacctcaccggaataatcttttccgtctcattgtgtctgaacttaaccccgatagtatcgggactattctcctccttccgagactatacgtttcaaatttttctattaggaatttttccacaaatagccatcagaatactctactccaagattccacaaaacgaattgtcctattggagtctctatatcattagtattctattagggatttacctgcctgttttcatagcaaaaatcgtagagaagattcccaacaaacttatccgctgttgtttcggtctctgattctatcgttttttcgcaaaaaaatctttcatcaaagcgatacactccccggccaaaacaccacactcgacctctgttttaggatgcaatacctgaggagcgaaacgccggtaacctcgtttctcatcgccggctccaaatacgacccgagcgagctgagcccaccctatcgcaccggcacacatcacacacggctccaatgtcacatacagggtacagtcggtcaaatacttaccgccgagcgaagccgcagccgaagtaatcgcttgcatttcggcatgagccgtcacatcgcccagacattcggtcaaattatgtgcccgagccacaaccctatctttacaaacgatgacagctcccaccggtatctcatcggcatcgaatgcctcttttgcctcctgcaaggccattctcataaaccgttcgtcctttgctctatcgaccatatcttctcataagccttgtgggaaacactatcatttctcatacgatcctgacaatattccccacatagtagctcttgtcctttttcttagaagctgtttttaatttattccgagacagattgagacctatgttgaagcagattggagtccgagatatgcagtcaatagcgggctattgacaaaaatcaagggattcaagatgcaagacaggggttcaatatggccggaacatacctgcttgaaatgataatattatttctcaataaatttaaaacagcttcttaattcttcaaataatataccaccgaggtcacgacccgcacatgcttcaaataaggagtattggcatccctatcctcgatagagaattgtccttgatatgccgatgatattttgcccaatttactatcggagtctttggcgaatttttcggcggcaactctcgcattttgagtggcttcggcaatcatttcgggttttagttcattcagcttggtaaacaagaactgggtgttatactgataatccccggaaacgatagccacccccttttccaacaaagaggcttgtttcacgatcaactctcgtactttctctacttgattcgaagataccgttattaccgaagtaacattatagcgatacgggacactttggtttccataccgttcggcctgcatatctacgattccgggagccgcaatagaaatttcggcatcggatatcccgttagctttcagaaaatttatcacgattgtattcttggtattgatcgtacggtaaatcgtgcccaaatcattccccaactccttatataccaaaggccagataactttatcggccggaacctcacgctccgacaaaccctttaccgagaccgtacgcactgcctccttcgaacgaacgataccttgttcgattcgttgccccaataaaaacaagcctactgctatgataatagccggcacaatccatttgtttttcataatcttccgtattttatttcttacaaagaaaatgcatgccagactcaaaagcaaattttatttgcaattttaccgaagacatagactattttcgcatttattgtcagtaactgtttcaaagataattattcgccatatccatcagactttttcttgctccgatttcttttttcatcgaatcttcgtatattcgcttttccaaattcgtacttatggcgcaacacaaccaattgggaaaaacaggagaggaacgagccgcagaatatttgatttccaaaggatacattatccgagacataaattggcggagtggaaaaatggaattggacatcgtagcctatcgtgacaaaacgttggttgtcgtagaagtcaaaacacgaaaaaacaacgaatttctacgcccggaagaagccgttacgctccgcaagataaaaaatataatccaagctacggatgcctatattcgtatgttcgatatacctttcgacatacgattcgacctcattaccttagtcggggaaaatgaagacttccaaatagaacatatagaagatgcctttcttcctccattaaactgtcgataaacatgaacgtagaatctttgcgtgaattttgtctgtcactaccgcaggtaaccgaatgtttcccattcgatgaatgggtgttggttttcaaaatcgaaggtaaaatgtttctcttctgtgatttgtcggccgaagagaaacgaatttcgctcaaatgcgatcccgaacttgccatagaattacgggaacgatatcccgaaatagaaccgggataccacacgaataaacgattgtggaattctatttggctaaggccttccatcgacgataaagtcatttgcgattgtatcgtccatgcttatagcgaagtgctaaaaaaactacccagaatcaaacgcgaacctttatcggaactactcgaagtatggaaacaaaagaaataaaattccaaaaaactcacttaaaggagatcggctcgaccaatacctatctccaagaatcggacaaagacagacatctcccggaaggaactatcatttactgcgacatacaacgatccgggcgcggccagcgtgggaattcatgggaatctgagccttacaaaaatttaacattcagtcttttactcagaccagaacatatccctgccaaccggcaattcttactttctgaaatcgtatcgctggcaactgtcgatgttctgaaccgatacgccactggattttctatcaaatggccgaacgacatctattggcacgacaaaaaaattgccggtattctcatcgaaaatgtactgagcgggagtacattctcacgggctattatcggaatggggctgaacatcaatcagaaaaatttttacagcgatgcccccaacccggtttcattatatcaaataacaggtcgcacctacaagatagaaaaaatattagacgaattcacagaggctttcggaaagcgatatacagacacatttacaaactcctccgaccgtatccacaaagaatatatagcgacactctaccgaaacgacggggtatatccgttttatagtgacggcaatattttccacgcctctattgccgatgtcgaactcgacggtcatctgcttttatcgacggaatcgggagagaaaaaacgcttcgctttcaaagaggtttcattcttgctttaaacgtttcaagaacggacgaataaccccgctgctttgaggcaactcatcggaaagtcccgacagcatggaaagttgttccgaaagatatttattgctacgaacccgtgcagcaatcgtaaaatattttttagcacaagctatatcgtcgtcgatcacttgccttttttcctctttatatacggaagcagagatagaaataccgttcgaatcttcaagatactgttgatctatcgatttcagtttttcctgtccctttatagcataatagcttcccaaaaacaagtttgcatcaaaattaagagagtctatatccaaaatagttttctgaacctcgaccgctgcggtatcgtttccaagcaacaacaaagcatcggctttggctttcaaataattaatttgcccgggcatcaccgacaacaattcgtcagcaacggcaagtatcttttcagcatcatgccgaaacacataataccctaataaataattattcgtcacccgagtaaaccacggctgttgttctttcaccaacaaaagtacctgttcataaatgcccgactgtccgatagatcgcgacaacacgtctatgccggtaaacaacgagtccaaagatagtccttgcatttccgaacgaaccacatattgcataatagacgaagaatcgttcatcatggccgatgcgacaaccgcatccacatacgttttcaccctaccgggacggcgttccaacaatacgtcatacatagcaacagcctcttgccactccctattgacaaagtgatcatcagcttttctcaacacagtacgataaggcatctcggcaaaagccgaaaaagcgatactacaaaaaaggaaaaatcctattatccgtcttatatacatacatttaattgtcacccattatgaacagacaaaaatagcgaaaggtgagtgcagagacaaacggaaattttatttccaatttgactatgccgaaccgcatcctattttcgtacttacaaagataacaaatcaactctgtaatataggcaatactgccgacaaaaataaaacagattccccgcgaaacttgcagcaatccggtaaatagtcccgatgaatcaattaaacataaactttgaacgagcttcattctaaaaataaaataaattaatattatatttataaataacaactttatacatagcattattcccatatctttgtaacagtaattaaaacagtccattaagataaaaaggctcgtcttcctgtactgttattttcaatccgagccgaaaaattccatcatgaaaaaactttactcaaaactattgacgttagtcactatcggtttttacagcctatctgtctgggcacaagatgctcctgtcattcagaattacagcgattataccggagactcattcgtagccaactgggacaaagtatcgggagcagacaagtatttcctcaatgtctacacgaatgggaccaacgtccaaaacgtaaatgaaacctttggcaacatcaaccactccaatgggaaaatagacctgcaatcgcccaattacccgaatggctgggagataaacgtgagtgaaaacggcagtaccgatatggtcgtctacgaaggtgtaaataaaattatcctcgatgcaacagacgactacataagcaccgaacaaattatcggaaccggcgtggggaaatatatcgttaacgccaacctcatcaatgcagaaaatatcacccaagaaaattcaagcttattcaagattgaaatattcgacaaagcgggtatacttcttagcaccggaacaatcgaaactttactttttgcccaaataaccgaattcaatattttcgacggcttcggatacacacaagcaaacatcgggcgcataaaaatatctatcgaaaaaggtgacggaaaaattggagacctcatgataaactctatctcttactcttgtaccgagccttcgtatattctgaaagatcaagcaacggccgaaaattcttatcctgtaaccaacctcgacccagaaaaggaatattactactacgtcgctgcttcggtggaaggaaaaacgacaaacgcatcgaacatcatcagagtaaatggattcctcactcccaaagccttagacgcaaccggcacatcggaaaactcgttcacggcaaattgggaaagactgcccaaagcaaaaggatacatcgtgcaagcgtaccaatatcacaccgcaacacaagacagtgagaagaaaatactcgacgattctttcgaaaaatcgacagagggtactatggacgatccgatctctgttaccgacccggacttatacaccgcagttccgggttggagcgggaaaaacatactggcagccaacggtatgctcggagccgacaacggaagatttcccgtaagcctctcttatttatggactcccacaatgaacctgtcatcgaataacggtaaatacaaaatccacatcaaagcccatgggacagccggagattatctgtcgatttatcgaataggctatatgatagacagcaacggagacggagaacccgatgcccttaacatacataaagtaacagctttcgacgaaaacggatacaccgaagaaacttgggaaatggaagacggtgctgaaaacatgcaactctccatcgaagaaaacaaactaaaaagatttttcatcgacgaaatcaccatcatacaagaaagcaaggccggagaggttacgagaatacctctcgttccggtaaccatttcggacggttctcaaacttcttatactttcacagatctcgaaacgaatggaaactacggctacgaagtgaccggtatgcgttacaacgactatgaggaagaagaatattccgaaacgtctaaccttattaccgtgcagttaatacattcaggaatagaaagtagcacaactcaaaacgtaaaagtaatcgcttctgaaaactcaatcaacatagctctatcagaaagggcactcatacaaatatttactgccaacggacaacttgtaaaaaccataaatggaacctcgggagaaaatatcgtttctatccctgctgccaatatttatatcgtaaaagtcggaagcaagatattcaaagtcatcgcccgataaatcatcggaaataggaaatcacctacacaatcgagaccggcaaggtagacttactttgccggtctcggcttttctcataatcactaatcggatattattttctcttcaaaggctacgtgaaccataaaaattgattatttttgcataaatgcgactgtttaattaaaagaacgaatctgattatgaataaccaatacaaaaggattctcctgaaactgagcggtgaatcgctcatgggcgaaaagcaatatggcatcgatgaaaaaagaatagccgaatatgccacacagattaaagaaatcgccgacatgggcatagaaataggtatcgtcatcggcggcggaaacatatttcgcggattgagcggaacttccaaaggggtagaccgtgtaaaaggagaccaaatgggcatgctcgcgactgtaattaacagtttggcattaagctccgcattggaaaaaatcggacaaaaagcccaagtcttcacagcaatcaatatgttccccatcggcgaatattatagtaaatggagagctatcgaggctatgcaaaacggaaccgtagccattatatcgggagggacgggaaacccattcttcacgaccgatacaggctcggccctaagaggtatcgaaatagaagccgaagtcatgctgaaagggacacgtgtcgacggtatttacacggccgatccagaaaaagatcctaccgcaaagaaattcgacaaaatcagctacgacgaaatctatacccgtggattaaaggtcatggacctcacggcgaccaccctctgcaaagaaaaccatctgcccattatcgtattcgacatggatacggtcggaaacctgaaaaaagtattgtcaggagagaacatagggactctggtatattaaacccggtcttatatggctattcttaaaaaaaagagtacatttgttcacgaaactaattatacagaaaaatttcaaccttattcattatggacgacgtaaagacatacttgaactctgccgaagaaaaaatggctatggccatcgaattcttagatgaagcattagctcacattcgggcaggtaaagccaacccccgaattctcgacggcatacgggtcgattattacggaagtttggtcccgctttccaatgtagctaatatttctgtccccgatgcacgtaccatcgttattaccccctgggaaaaatccatgttcaaagtgatcgagaaagccattttggattcagaattaggcatcactcccgaaaataacggcgaaatcatcagactatcaattcccccgttaaccgaggagagacgtaaagcactcgtcaaacagtcgaaacaagaagccgaaaatgccaaagtgagcgtgcgcaatgcgcgccgggatgccatcgatgggctgaaaaaggctcaaaaagagggaatgcccgaagatgtcgccaaagacggagaaacctcggcacaaaaacttcacgacaaatacatgaagaaaatcgacgatatgtttgccgaaaaagagaaagagatactcaccgtataaaataaaatctaaaatatattcaaaagggctttcattatcgaaggcccttttcttttttctcgattcaaaagtttctactgtttctaaggttcagtagaaaatccgtggggtaagcatgaattttaacgataaatctctcgtcggcacacacattccggtctcttcggagagaggttggaaaagatagcataggagtttttgattgtaaggcttaacccctccgtcactacgtgacacctcccctatattttgcgctgcaaaacgccccgtaaggttacgggacacggcaggggaggagggaaaatacccacaaagcatcggagtggataaaagctgttcaaaaggaacctttcaacactatccctctgctcatcgcagatgagatagggggagtgcccgtagggctacgggacacggcagggggagagagccaaaatgcagttcaaaaaaacaaatgcattcgttgttatccgactctcgtccttcattatatttgtagaatatcggaggcggttcggcatagtcaagccgaaaatgtaattttcgtttgtctctgctctcaccttttgctatctttgttcattaaatttcattgcatggaaggtcttgtcacaaaaaatacgggaagctggtatatcgtccgcacagaaaacggagattcgatacgctgtaaaatcaaaggtaatttcaggttaaaaggaatacgtagcaccaatcccgtatcagtgggcgaccttgtggatatagagttaaatcccgaccaaacggcttttatcactcgcatacacgaacgaaaaaactatattatccgccgatcgtccaacttgtcgaaagagtcccatatcatcgcagccaacatagaccatgccttactgatcgtaacggtcaacacgcctccgacctcgaccacttttatcgaccgttttcttgccacagccgaggcgtatcgcatacctgtatgcatcgttatcaataagagcgatacatttaccgaagaagaccgggaatatgccgaagcacttcgttacctttacacctctatcgggtatgactgccattgtgtatcagcgattaccggtgaaggattcgatttcatagactcatttatcgcaaacaaaattaccctgttatcggggcactcgggcgtaggaaaatccacgattatcgaccgtattctaccgaatgcccatgtaaaaatcggagccgtatccacttctcaccacaaaggcatgcacacgaccactttttcagagatgtaccctttgccacaaggtggatacattatcgacactccgggtataaagggcttcggaactatcgatttcaatcccaacgaagtggcacatttctttcccgaaatttttgagatttcccaaaactgccggtttaacaattgcacccatcgacacgaacccggttgtgcggtattaaaggcgttggagaaccaccaaataagcgaatcgaggtatacaagctatttgagcattatcgaagatagttcggaaggaaaatatcgggaagcattttaaaaaagattgaagcgaatcggcgcaatgagatacaaaggcattggaattttatttttcatgatggcaaatatcctatcgacaaatgcggagggaaaagacttgcttgtaccatcgaagaccgacaccgttaccatcgatacgctttcgacaaaaaacaggatttcattacccctacccaacacactcgtcaacaaacaaatcgaccgtctcgtcgaatatgccagaaaatacatcgggacaccttacaggcgaggaagcaaaggccccaaccgatttgactgttcgggtttcacgcagtatattttcaaccatttctcctattccctcaatgcaagttccgcttctcaatatttacaaggaatctctgttaaagacgaagaaatctgccggggagatttggtatttttcaaaggtagaaatccccggcggtcgaatgtaggacatgtaggcttggttacggaagtatatcccgacggacgattcaaatttattcacgcatccacatcacaagggatacgggaagattggaacttctctccctattatgctcaacgatatgtcggagcccgacgcatttatttcgttcaaatcgacaaacgactgattttagatgccattctcgaattggaagacatcgatgacaacactccttttaccgaaatggaaaagagtattacgccgcaggaattttcaacttttgtccgggctgaatagcatttcctttcaaattgttcgcccgtttaatatcttcggccgaaacccctttatatttttgagaaatcgtccataggttctcgcctttacgaaccgtatgatattgaccttttgctgacgaagccgtagacgaaaccccgcttttacttgtcgttgtcttgctacaaaccgccaaacgttgcccgatacgcaaatatgaattttttcgcaaattattccaagagcgcaagttacttaccgacactccatatttttgagctatcccggaaagagtctctcctttacgaaccttatgatataccgttgttccgggagccaaccctgccggctcaacggcaagccgtcgtgcatacagctcctgattatgcgcaaaaatagcatcctgcgcctcgataaaagcatagacctgttgcgatggcaaaatgagcgcataaggccggatattacccggtataatgtcgcgacgatattgaggattcaaacttcgaatctcctcgatcggaatctgtaatacatcggatatctgctgcaaatggactcgacgtgtcacttgtacggtatccgttaacaaagggcgccgggtaagtaccggacagatattgtggtcgccataataattcatcacataattgactgcgataaaagccgggacatagcctctcgtttcacgaggcaaatagggataaatctcccaataatcggttttacctcccgaacggcgaatagctttgcttacattccccgggccacaattatacgatgcgatagccaatgcccaatcgtgataaatactatataaatctttcaagtaacgggctgccatcgccgaagatttaataggatcccgccgttcatctacgaggctgttcacctccaatcccatactctttcctgtcttgaccatgaactgccacaaaccggccgctcctacccgagaagtagcatcggggcgcaaagcagactcgataatcggcagatatttcaattccaaaggcaaaccttcccgttcaagagcttcctcgaaaatgggcatataatatgtactcaatcccaaaagattctcaacaagcgctctccttttctgtacatacatgtctatataacggcgaacgacactgttataagacatctcgataacagtcggcagttgtgataatttacggatataaaccgaatcgggataatccacattaacgctattcaccaaacaggaatcatctacaacagcatattgctgcatgtaccagtcggtcaaaagattattcaaatcggcctccatactttcgggatacacgatagcattatctatcgtatccgacaaggcaacctctattgtgtcggtatctacgatttcctcgtccgtttctatttgggaaaaactatataaagacattcccaagcccataaaaacaagccaaaatttcttcatagcaaataaacattaaaatgtaatcgcacattgtaatccgatcgatggcaataccgtacgcccggtaggaataatcgccggctgccacttcatcgaaatatcgggactgacatcaaaatgatacaactgagcatcgacataagcatctatcatacaaacagcataaagccctatcatacaaataatacataggtcacgattctgtctataatagtctttcctctgcttcaatacacgggttaaccattccttgtctatatcttcctcgcgatacgacgacgaaaaaaaatccatataactgttcgtccccggatcactgtccataatatccaaataggctcgttgataatcagacaacatacggctattccatgtcgtagcataaaaaagccctacatatccgcccacgacgataggcaatttccaatacctatggttataaatttgacccaatccggggaacagagccgatagccatacggctctcatcgggtcaggattgaaatcggaaggtctccacgatttgcgtgaagccgctttcattcccaaagaatcagacggagcaagcccacccagagaatcggtaatcatcaccgggaccgaatcttgaaataaagctccgacactatctcccgaaataaccgaaatagaatcgggacgattatatctcgcattctccatttccaccgtatcggcagaattaacttctacctctactaattcctgatatccaatattcgaatcggccttgacttcaagaatagacaatggtaataacgcaattataaaaataataatcacggcacgtctcaatcccatgtcacccgatattcccaaaatcttatttcaatttatcgaacaaaccgataatccgttccaaatcttcttcgttcttaaatggaatagatattttccctttccctttttcatcacaggtaaactgaaccttagcgttgaagaaatcggacaaatgcgatttcagtacattatactcttgtcgcatcataactttcttctgcgctttcttacgggcccgctcccctccggcagataaagttttagccaagtcttcgacactacgcacactcaatccgtcggacaatatacgctcgtacaactccaactgcaaagcagggtcggcaacagacaacaacgcccgagcatgccccatatcgatacgtttatcccgcaatcctatctgtacctcggccggaagtttcagcaaacgcagatagttggctatcgtcgtcctcttcttcccgacccgctcactcagtttttcctgtgtcagttgatacaattctatcaatttctggaaggccaatgcaatctctatggagttcaagtcttcccgttgaatgttctcgataagagccatctccatcaacgtttcgtcctctaccgttctcacataggcgggaatcgtttccaacccggccatttgtgcagctctatatcgcctctctccggcaataatctgataatttccaccatctacctgccgcaacgaaataggctgtataatacccaattcccgaatagagcttgccaattcttcgagagcttcctgatcgaattcccgacgaggttgatcgggattaggcacaatctgggataattctatttcatgaatagaagatgtgccgctggttacaatgttatccatcgaaatcaacgcatccaaacctctacccaatgcacttcttttaggagttgccataacttatcgattttagccgcttatctatttttcattatcaattctttcgccagttccatgtgattgacactacccctcgactcacaatcgtatagcaaagccggaagcccgtgactcggagcctcgctcaaacggatattccgttgaatgaccgtattaaataccaagttcccgaaatgccctttcaactcttcataaatctgattagccaaacgcaaacgggaatcgtacatcgttaacaaaaagccttcgatttcgagctgaggattcaatttcgattttatgatcttgatcgtgttcaacaacttgctgataccttccaaagcgaaatactctgcctgtacgggaataataacagaatcggccgccgtaagagcattgaccgtaatcaaccccaacgatggggaacagtctatcaaaatataatcataatcgcctcgcgcttcgctcaacacatgagataaaacccgctcccgatttttcaaattcatcaattcgagttctgctccaaccaaatcgatatgagaggcgaccaagcccaatccctccacacaagtttcgacaaccgattccttgatcgaggattgccccaccaaacattcataaatggacgacttcacctgttgcggatccactcccaaaccagacgaagcatttgcttggggatcggcatcaatgagcaaaaccttcttatccagaaccgccaacgaagtggccaaatttatagaagtcgttgtctttccgactcctcctttttgatttgcaatagcgataattttacccatattgttattttttcttcacgaagacagtgtagccggaagcaaaacgaaatcccatttcttgcgccgagataccctttcttcacgagtttcccatcgcaaaggaatatcttttaatttgtatttcattctctcggatgcccaaaaatatcataattgttgataagtgaccctttttgttgataaatcagcagaatcacttctccattttctgcgtaaagatacactttttttacaagaatcccattaggataaaatctgtcttttacctattttatgactccatattatccgttaaaacataaaaaaaacgagtattattcattacctttgcataaagcaaaaatgaagtgagcctcggtatatccgagtgaacttgtttcgattcacgtcttaccctatctttgtaatagtcaaacatattttctctttatatgaaaaaaataacacgttctcataaacctctcattctcatcactaatgacgacggcatacaagccaaaggcatccgcgaagtcgccgattttctaaaacccttaggagatattctcatagtcgctcctgatgcgccccgctcgggacaaagctctgcaattaccgtaacttctccccttcgcatgaaagtcgtcgaagagcgaaacgggtttctcgcaattcgcaccaacgggacaccggtcgactgtatcaagttgtcgatgaacattcttttagacgaacgccccgacttaatcgtatcgggtattaaccacggctccaattcgggagtaagtgtcatctattcgggaacaatgggggctgtttttgaaggagccttattacatataccttctatcggattctccctttgcaatcacaaagccgatgccgatttttcgcactgtcgggaactcattttggacgtatgccaaaaagcattgacccataaccactggccccaaaacataggacttaatatcaatattcccgatgtgccccaactcaaaggctcgaagatttgtagagctgcacaaggtcactggaccgaagaatatgattgccggacagatcctcacggacaggaatattactggctaaccggaaaatttaaaaatgccgaacccgaagcaaccgatacagacgagtattggttggaacgtggatatgcgacgattgttccctgcacaacagacaactccgtcctcaatatcctccccgaactatcgtcggttctcggaatataaaaagactatccaacacgacaatacagataaaaaaaggcgggaagcatttcccgccttttttatgaatacaaattgaatacatattcaataatagtttaaatatcgcccagtattgtaaaaaatatacaaaatttattctactattttcatttttaaactatatttgccgcataattattcaaatatatcataggcatgaaaaataaagttgcccgcttacaagctataagagaaattattatccattcaagagtaaaaagccaagatgaaatcttgaaaaaattacacgaattaggatttgatttaacacaggctactttgtcccgagacctgaaacaattgaggattgccaaagttcccggcaatgacggttcatatgtatatattatgcccgaaatagggagtataggcaaattgatgcaggaaaaactatcggagaatcccgagcgacaaatacccggaggattcatttccattaatttctcaggaaatttgtctgtaattaaaacaagaccgggatatgcaggaagtctcgcatacgatatagatagcaatactcctcccgaagtattaggaactattgccggagacgatacggttttggtaattctggaagaaaacatatcccatcaacaggccatgttggctctttcgccctttatcccggttttacatgactaattttttaactgatcctataacaacacctacaacacctcttttaaggagaagaggtttacacatcatggaagaaataaaagtatttgtagccgacgaacgacacattaaatacgtcgacacgattctcgacacaatcgagagagctgcaaaaataagaggaaccggaattgcaaagcgttctcccgaatatgtaaaacaaaaaatgctggaaagaaaagcaatcatagcattggacggagacaagttcgccggcttctgttatatcgaaagttggagcaacaaacagtttgtagccaactcgggattaatcgtcgtcgatacttatcggggacacggtttagccaaaagaatcaagcgcaaggctttcgagttatcccgcgaacgatttccggaagccaagatatttgggttaacgactggcgaagcagtcatgaaaataaataacgaattaggatacagacccgtagcatttgcttcgttaaccgacgaccctgccttttggaaagggtgcgaaagttgtgtgaacttcgacatcttgcaacgaaacaatcgacgcatgtgtctctgcacaggcatgctttacgaccctcacgaacatgaaaacaaagacaaccaagaactcaaataacaaaaacatcatggcaaaaaagaaagtagtattagcttttagcggaggcttggacacctcgttttgcgttaaatatctatcggaagaatgcggatacgatgtatatacagctattgccaacaccggaggttttaatcaagaagaattaaaatccatcgaagaacgagcctataaattgggtgcggtacaacatgctacactcgatataacacaagaatattatcagaaaagtatcaaatacatggtattcgggaatattctaagaaacgggacctaccctatttctgtcagttccgaacgaatcttccaagccatagccatcatcaattatgccaaagaaatcggagccgattatgtagcgcacggtagtaccggagccggaaacgaccaagtacggttcgaccttatattccaaatattggctcccgaaatcgggattatcactccgacccgagatatgacattgactcgtgaatacgaaatagaatatctcaaaaagcacggatatacagccgacttcaaaaaaatggaatactctataaacaaaggtttgtggggaacgagtataggaggtaaagagacgctaaaaagcgaccaaaccctgccggagtcggcctatccgtcacaaatgacagctactcaaagcaagactatcacgctcgatttcgtcaaaggtgaaatcgccgggatcaatggaaaagcatacgacaataaagtcgctgcgatccaagacctcgaagcgctcgccgctccctatgccataggacgcgatatgcacatcggagatacgatcatcggtattaaaggcagagtcggattcgaagcagccgcacccatgcttattatcgccgcacataagatgttggaaaaacacaccctcaccaagtggcaacaatattggaaagatcaagtaggcacgtggtatggaatgtttttacacgaagctcaatacctcgaaccagtcatgcgcgatatagaggcttttctcgatagttcgcaacaaaacgttaccggacgtgtaatcatcgaactacacccttatcgctatgttttagtgggagtcgaaagcgattacgatctcatgaaatcggactttggcgaatacggcgaagtaaataaagcgtggagtgccgacgatgtaaagggctttaccaaaattctgggcaaccaaatgaaaattttctattccgtacaaaataaaaacaaaaaataaattgtagattagacgctgaattaaactattaaacccgtaattatgataaaagtaggtatcatcggaggggccggctacaccgccggagaacttataagactattgatcaaccaccccgatgtagaaatcattttcgttcacagtgaaagtaacgccggaaacaaaattaccgacatacataccggcctgttcggtgaaaccgatctcatattcaccagcgaaactcctttcgacgagatagacctgcttttcttctgcacggcacacggagatactcgtaaattcatagagagtcacaaccttcccgaagaactgcgcattatcgatttatcgaccgactatcgactcgatgctcccgggaatgacttcatatacggtctgcccgaattgaacaggaaatacatcattcgttctaaacgagtggccaaccccggctgttttgctacggccattcaattggctctgctgccgttggcaaaaaatctgctgctgaacaatgaaatccatgtgcacgcaatcaccggatcgacaggagccgggcaaaaaccgtcgcagacgtctcatttcagttggcgcaacgacaatatttccatttataaacctttcactcatcaacatttggacgaaatacgccagagcctgtccaaactgcaaaacagtttctcggctccgatcaactttattccagtcagagggaatttctctcggggtattttcgcttcgctgtatctcgactgccctgtcgaaatagagctattgaaagatttatacaattcatattacgacgatcataattttacatttctcaccgacaaaatgcccgacttgaaacaagttgtcaataccaacaaatgtctgttgtatctcgaaaaacatgataacaaactgctcatcgtttctgtgatcgacaatttattaaaaggggcatcgggacaagctgtgcataacatgaatctgcttttcggattgcatgaacgggttggcttacatttaaaaccatcggctttttaacaaaaagatatgaaacttttcgacgtatatcccctgttcgatatagaaataaaatcggggaaaggctgttatacttacgatacagaagggaatgaatatctcgacctctacggtggtcatgccgtcatttccatcggacactcgcacccttattatataaacaaaatcaccgaacaggcacagagacttacattttactccaactcggtcaaaaacagtctccaacagcaattggccgataaattagggaaaatatcgggatatgaagactattccctattcctcatcaattcgggagcggaagccaatgaaaacgctttgaaactggcctcgttccacacggggaagaaaaaggtaatagctttctccaaagcatttcacgggagaacctctgccgcagtgaaagtaaccgacaaccccaaaatagtcgctcccatcaacgacacttttgaagtggcttttttaccgctcaacgacatcgaacgagtgaaaaaagaaatttcgaagggagatgtctgcgccgttattatcgaaggcatacaaggtgtaggaggaatacaagtacccgacacacaatttttgaaagaacttagaaatatatgtacccaaaatcaggtcgttctcattctcgatgaagtacaatcgggatatggtcgaaccggaaaatttttcgcacaccaacactccggcatacgctccgatttgattactgtcgcaaaaggaatgggcaacggatttcccatcggcggggtcctcatcagccctgctttcactccggtctacggtatgttgggaaccaccttcggagggaatcatttagcctgcaccgcagcttgtgctgtcctcgatgtcatgcaagaagaaaatttaaccgagaatgcagccactgtcggagagtatctcatatcccagctcaaaacaataccgcaaattaaagacataagaggtaaaggcctaatgataggactcgaattcgattacccggtcaaagaacttcggaacaagctactcttcgagcaacatgtatttacgggagcttcgggaacgaatgtcattcgactgcttccgcctctgtcgttatccaaagaacaagccgattgttttatcggcaaacttaaaaacatactctcatgaagatatcaattatcggaggcgggaacatggggggagccatagcccgcggattgtctcaaagttcaatcgttgccccgtcggaaatcacagtcagtaaccgaggagaagaaaaactaaacgaactcaaatcatttaatccttcgattcatacgaccaccgacaacaaagaagccgtcaaggatgccgatgttatcattttggccgttaaaccctggatactcgacagtgtggcatacgacatacgtgaagtgctggactttccccggcaaatcatcgtttcggtggtagcgggtatcacattggaaagattgtccgaattattctcatcggaagatgcggctccggctatttttagagtaatacccaatacggccgtctccattcgacaaagtatgactctcatttcgccctacaatgccgtaccggaacaaatagattatattcggtctctattcgacagcctcgggaaaagccttctcatcgaagagaatctgatgacagcagggacagcgctctgctcctgcggaacagcttttgtcatgcgttatatgagagcggccatcgaaggtggaatagagatgggaatttatcccaaagatgcggctttactcgtagaacaaacggtcaaaggtgcagcggaattattattgactaacggctcccaccccgaagtcgagatagacaaagtaactactcccggcggtattaccataaaaggtctgaacgaaatggaagccgcaggattctcctccgcagttatccgaggattgaaagccgccaaataacaaaatcgggttctattctcactaccatcataagccccgttagagcagactaacggggcatttttgtaaaccatacaaggagtcgtttgttttcttttcgattatattggttaccaatcaaagataagatacaccttaactcaaaaaaaacgaatagacctgtcttgttctatgcgtaactttcactatctttgacgctacgaagatacgatgcgattcggcatagccaagccggaaacaagatttccgtttgcttctgctcccatctttcactatctttgaaaattaattttacaatcactcaacgactatgtcagtaaataaggttattctgatagggaatgtaggaaaagacccagatgttcgatacctcgaaaacaatgtatgtgtcgcgaatttcacattggctacgacagagcgtggatatacgacccaaagcggtatacaaatacccgataaaacagaatggcacaacatcgtggtttggcgcggattagccgaaatagcagaaaagtatgtccgcaaagggactcaactatatatcgaaggcaaaattcgcactcgttcatgggaagaccaaaacaagattcgtcgatacacaaccgaaatttatgtcgacaatatggaattattgggccgacgcgacggacaatcatcaccgagttctgcaccggtaatgtcccagtcgcaaaataatccctctccggcaaacacaagttacaattcccctattgaaaatagtagcgataatgatttgcctttctaatataatattgtaattttgcgagaaattaactggtatctatgtatttataaactggaaaaatacggccgaaatagataaaattcggcagatacccattgtttaactaatcccactgattcttggacccagattcgtatttatcggtattctcctcagccatagaaattacagttccgtcaggaggagctattttagcaatcgtattggccggattatttttgtgtgtttctgcatttgtctcagcttctgaaatagcctatttctccctcacgtccgaagagttacaagaattcgacgaagaatcccctcgggatcgtttagtcaaacgattactcgcccgccccgaacaccttttagctacgatacttatatcaaacaacttagtcaatgtagcagtcgttatcctttgcaattttttcttctcagatattctacacttcaatagtgaagtattggactttattttccagacaatcctgctcaccttcctccttctcttattcggagaagtgattcctaaattttatgcaaatctaaaacctgtcgtttgggctaggaaaagctgcaaaggattgtctttattaggaaaaatattctccccgctggccaatttcttggttcgttcaacccatatcgtaaataaacgtatcgtacgaaaaaacaccaacatttccatgaatgaactttcgcaggctctggaaatgacaaatgtcggagctaacgacgaaaaagaaatgctcgaagggattataaaattcggaggtaaaacggtcgaagaagtcatgacagcccgggtcgacatcaccgatattgaaatgcggacagatttcaaacaactcctcgacacgattatcgaaaccggatactcccggctcccggtctacgatacgaccgaggacgacattaaaggaatcatatacagtaaagacctattaccctacattggtcaagaggcatcgttcgattggcacaaattaatgcgccgagcttatttcgttcccgagacgaaaatgatagacgatttgttagaagaattccgcacgaaaaaaatacacatggcaatcgttgtcgatgagttcggaggcacatcgggaatagtgactatggaagatattttggaagaaatagtcggtgacatcagcgacgaatatgacgaggaagagaaaaactatacgaagatagatgaaaacacctatatattcgaagggaaaatacttttaaacgacttttacaaaatcacaggactagacgaaaatgaattcggtgacaaagcagaagatgccgagacgctggccggacttattttagatatcaaagaagacttccccaaaataaaagaacaaatcgattatggaagatgccagttcatcgtactcgaactagacagacggcgtatcggtaaagtaaaagtgattatcaattccccttcggaagagtgaagcaaaccatcgattcatatccacactttcacatgcgattgaataaagccatactatatacgaccctcttcataactatgggaccggtaatattttcctgccacagaaaatatacacctcttccagacggatactttcgtatagacccataccccgaagaatataaagaaatgactttattatccccttttatttctttcgaaattccagacgggacaacagctaccctcgacaaagacaccacattacacaaaaacgacgttaaatggctaaacataagatatcctcgttatagagccactatttattgcagttatcacatcttgcacaaaaatctcgaaagcctgctgaacgaaagtaaagacttggtttacaggcaaagtattcgtccggacttcataaaagcaggtaattacgaagatcctgaacgaaaaatctatgcaaccttgtataacctctctgccgaaagtgctacgcctttacaatttgtagttaccgacagtacccgatacttgctgagaggagctctttatttcgatgaatccggcaaaagcgactctatcgctccggtcatcgactacttatcagatgatattattcacctaatcgaaagtatcgaaactcgtgccgaataatgccttttcacgaacacatatcgacaaaattcggagcaacaatcgttttgtggcagctcacagaaaatgaacagaccatagccaccctgctttcagaaaaagagcgaagcctcatagactcacaaaatctttcccccaagcgattctgcgaacgagctgcctcccgattatcgctaaacagaataaaagaaactctaaacgacgatataacctacaccgccgagggtaaacctcacttactcaggaagtccggtcacatatcgatttcacacacaaaagaatgggtagctgtggcttaccaccctttcttaccgataggaatagacatcgaacgaatcggcgaaaaaatagaaaaagtagccccacgcgtatttaacgcccctgaattgaatatatcatcagagaatcggggaaaatggttacacatctgctggtcggcaaaagaagcccttttcaaagctatacccgagaccgggatagactttcgggaacacttgcatatcgtccccgccctccttacagaagaaggctacctatcggcgtgggagactcgtaccgaagccacaaaagcctacaccgtttggtatcgcatatacgatgatttcgtactcgtctgtacggtccctttacaataattcggccttaaacccggcggcacgcacagcctctacaactttctccgcaggcacatcggctttcaccgtcaataatttatcgggagacgacaaatcgatactccactgctcaggagtcaaaaacgtatttagctgttccgctatcttggcaacacaaccggcacacttggccgaagtttttacttgtatcatttcactatattttttaactattctttatcgtaacctcaaactgttgagtatcaccgataccgagctgaatgccatagcagcactcgcccacatgggagacaataatatccctacgggataaaggactccggctgcaatagggatgcacactacattataaccgaaagcccaaaaaagattctcccggataattcttacggtctttcgcgatagctttatcgctctcggcaacaaagccaagtccgagttcatcaaagttaccatagctatatccatagccacatcggttccctttcccatagccacactcacatcggcccgtgccaatgcctgtgaatcgttaatgccatcgccgaccatagccacacatttgccccgacgttgcaaatccaagacaaaacgctccttatcatcgggcaaaacaccccattcataatgggtaattcctgcttgacgagcgatttcggaagccgcagactctttatcaccggtaagcatacaaacctctactccgtacgactccaattgacgtactgcctctttcgaattttccttcaaagcatcttttacttcaaaagcagctaccaacgaatctcctttaccaaaatagatagaaaacaaatcgggtaataaaacacccacattctcttccgccaatgccttgcttccaatccagaatttctcacctcggtattcacacattataccttttcccgtaatactttcaaaagccgatatttcgacaggcttgacccccttctgtcgcaaatactccgaaagcgacactgccaaagggtgctccgaacgcatttcggctgccaacaataccgacacatactcttcgaaaccagagtataatttctcgccgaccaccttcggcgttccttcggtcaaggttccggtcttatccagaacaattgcattcacacggcacatgttctccaaagcaaaggcatctttgatgaggatatgctgttgcgccgctttaccgatacctacggttaaagcggtaggcgtagccaatcctaacgcacacggacaagcgataaccaataccgagactgcggttaataacgcatagggaaacatgttccacccggcaaccgaaatccaaatcacaaaagtaagtatagataacaaaataactaccggtacaaaaacagacgaaaccttatcgaccaccccctgaacaggagccttactcccctgcgcctcctgaaccatacgaaccatacgggcaagtacggtatcggctcccgaagcctgcacgttcaaccaaaaagcgccacgctggttcaacgttccggccaaaaccctatccccggcttgtttcttcacggcctcagactccccgctgatcatactttcatctacataagaaccaccttccaaaacagtcccgtccaccggtattttctcaccggggcgaacactcactgtatccccgggaagaagcatagcaataggtacatctttttcttccccgtcctttccgaccagccttgccgtcttgggctgcaatcccattaaagaacggatagaagccgatgtgctctgcttagccctcgcttccaataatttccccgacaaaacaaaagctataatcatagcaaccgcttcgtaatagacatgcggaacaagtcccaaagaaagccaaaaatacggataaatcgtactgaacaagctgaacagaaaagaaacggcagtactcaacattaccaaagtgtccatattggctcgtcctcgttttacagccttccaacccgatacatagaacgaacgcccccaatataacaccggaagagtcagtgcgagcaatatccaagtaagaatctgtgaaggagaatgaaaaatcatcgacaataccatcaccggcaatccgaaactccaagcaccaatggttcttcttcgcaaatcgagataaagacgatgttcggcatcaatagcatcagcttccgcattttccgaaataaccaagtcatatccggcggcacttaccgcagcctgcatatccttcaacgaaatcttatcgggatcataaaccacctgcaatgtattagccgaaaaattcacacttgcctcttcgaccccggtcaactcccgaacagtcttctcgactgttgccgcacaaacggcacaactcatttccaaaacgggtattactcttttttccatactatccctttaattagaaattaacaccctatcctcgattttgctcaccaaatcgaaaaaaaaacaacctttcaggcatcgcctccatcgtcgagctgctgcaacatggtgcactttccgttcaacacggctccgggctctatcgccaaccgtcgagcctgtatatcgccctccaaagaagatgtcgctttcaacaccaacatctcggccaccattacattacccgttatacgtcctaccacttcggcattcacagcaacaatatcccctatcacctgaccggtctccccgatgacaaccttaccctgacattccaatcgtccctccaaagtcccgtctatgcgaatatctttttgcgaaactatcttcccgacaatcgtagtctccgctgtcagagcattatgcgccatacccgaaaaagtattatcctttgccataatataatcttatttattgactccaaagataacataaaccaaaggtaaaaacaagtttaccggattttacgagatgcagtccatctccacatctcatacaaaaagaaaaaaatctattgaaatcattctattctaatctcataatcataaaaagatattataagaaacctgttttttccctatatttgctccataaaacaatctgtatgagaacctccattcacatcggggccctgcacttctacgcccatcacggagtactgccccaagaacaaaaagtagggaactatttcaaagtagaaactactctttatacggacttctcccgagctctcgttacggacgaactgaccgatacactcaactacgcagaagtctgtaaaatcatttctgacgaaatggctataccctctcgcttacttgaacacgttgcaggacgaatcaccaactcgcttcgttctcattatccacaaataacaggaggtcgattaatcgttaccaaagaaaagcctccaatccccggcgacattcgcgatgtgtcggtcattgtcgaatggtagaccttcttcccaaactaacggccagcgggtattttgtcgattctcctttgatggcggccgccctcgaaaccggtattcaaaaatacgtcgactatctctcggcaaagttctcccgaaataaatcggccgggcataactaacacgttagcatcattatgttgacgagccaatgctgcaatctcagtcgtccagcacaatgccgcacggattccctgatgtttgttcagggtcatatttataccattcccactaccgcaaatagcgatacccggataacattcacccgcttccacagccaaagccaaaggatgtgcgaaatcgggatagtcgcaactatctgtcgaatatgtcccgaaatccttatatgcgatacctcgaacatcaagttcccgcataacaatctgtttcatctcataaccagcatgatcgcatgctaatcccaccggctttccctcttttaatatgctcataaattttacagttcaattaaactataatagggaataaaaacacaaagtcggcatcttgatgtccaaacacccctgtttttgcatcccacggatacaaaaatacgaaatattttgagatatagaccgattcaaatataataaagtagggaagtacaagtcaatggtataaggttttgtcgggcgacattcttcctctctgtcgaaaaaacagagaattgacgggttgaaaagtgccctcgctttttgcttacccatagctttttatctcactttctatatctgtccggcacagcagaagccacgaaaatctctcacatatacaatctttctatattactctaagacaaattcaaacagctcttattctatcaccgaaccatgttctttcaaatagatacgcaacaattcgaaaaatgcaggtgcatctaacaatacaatactatcatcttgcgctttcacctcattcatcacctcacaataccaagtaggttgtttcagaatattacgaaaccaatggaacggtaatgcagaacgctcttttacacgttccacgattcttttggcggcaactttcgggtcaccgtcattgatgtccaaatcggctcgtattacaggcatattgccatgtaacagggcggttgcaatcttctgaggcacaataccattcgggctaaaagaagcataacagtccaaaccctctttattcaatcccggggcatgtccgtcaataacaaaaccggtaatcgacaatccccatttcttataatactttttacagtgcttaccccatgtttccaaaccggacggaagcccagactctcgcggttcttgcaacataccaggcatgatatatcccgctccattatcggccgcagcgaaataatcattttcagtggccgttgtgcggaagttatgcataatatggggcacgcgctcagccaatacgggactgatacaccacatcagaggcaattttccacggttcgggtcgtcccatatagaaggtgttctttgtgatatccatgcggaagcatcataatcgccgacataaaaaataataaaattcctgccatctacatttactttaccgtcagccgtcaacaaccctctttctcttaattctttatgagaaatccaattttgagtatattgctttttggtagggaaatgttgccaaaaagaggcattcgccaatgcgccatagccaatagcatctgcatccttaaaagcattgtatgcactgatgatacggctgaactcccattccgtaggcacatcatcgtggctaccagaagcatgcattgtgtatttataagcccacgcaggaaaacctcctatgtagcacatcttttcattgttattttgccgataagccaacagcaacatttctttcagtgtattcaaatcagtgccaacagcttgggtaggatcatcagtggccggttcatctccccacggagataaatcgaagaaaaaggctcctttacttacaaaaaaatcgtggttgcacaaagtgtggtgattccttacggtggcaaaaggtttctgcttccaatactgatcaatgtaataagcggcaaactccgtattgcactttccggttttcatatacttctctataaaccaaacataaggatcgttcttcaaggatccggtagagtagcgttccgttcccggaatctttgtccctttcttaccggtaaacatagaagtgccatcagggttcaacaaccatctttttaccggcaatttaggcccgtgcaatacaagacgatcatacaaacttcccggagtttcatcataacgaatagccaccaaattttcaattcctgctaccgaggatgccacattactggtagaggcgatgtttccatcataaacgactaccccctctatataaggagcatatgccgtgaataaatcctccattgtctggtatgtccgtgtctcacgtccatacaaccattcacctttctgacgatatttattccaccaataaccatcgatatcgtgattaccctccattacaaagtaaacatacaaccggggagcatccctgtttaccactccttgcaaagtagagaccgcatgaacatcgtcccaagctacatcgagtccttctttggtattcaagtcggtattgagtgtataacgtagatcataaataccgatttccgcattggcaaaagccgtatatatcatcaacaataatacagctacgatttttaaatatctatttatcatttttctatgttttatttttgttatctattatttttcacacggtattctcaatacagtcagcgaattggcctgacaatcaatagtaaattcactgctaattcccgataactcggtgacgttcggaacaattttcaaaggatcgctgaaactattttcatcaaatctgtcgtctgcacctaatacaattttagttcctttcgatgccagatttttcgccttatccaattgtaacctgactttccagttaccggcctcggcatttaccaatttaacaataacttcttttcgctctctgtcataacccgatacgacataatgttttttcttaggagcataagtatattcatattgtagctcatcgttaagaaaacatttccaatgagcaccctcgatttcgattctcaccgtataccattgatcagtcttaatagatgccgtatttcgataatcaaataacgaaataggaccttcattattcacctctcgaaaaataacagactcattagtgtggcttcctatgtccgccataaaataattattcgaatccgtgccgccaaacacaattctgaatccttctgttccagaaatttttttggccttcaactcaatcgtacaatcatcaaactccctatcttcaaggatagccaaagcatctattcctttctggctctgagacaaaagatttccttccattttccaatcgccgcgaattatagtccatttatccacgaaatcactccaccccgaagtatatatttcttcgccatttacaatgactttcaaatctttaaattgagcttccgtattattcgtacccaatccgataaatccatttgtgcggaataccggctcaggagaagcaggttttaaatctgtgtgtaaattcacatcagggcgattctccgagaacatttttaacacatagtaattcgtacggccataaactgaatcatttttcagcactaacaaatgatcttttccgtgagccgcattctctatcaacggagcataagataccatttgaactttatccgcattcctttcaacccccgtcagataagcagcctctgccaaagacgaatagagagagggtctgccgatagccgcatattcccccacatagattttatacggaatatcatcgggcaacttatcataaacatctgcattattatagaaccaaccagccgtctcataataatggggatccaagatatctattttctccgcctcttgaatataagggctgaacatgagagcacatacgacctctatctgaggatatttttctttgatggctttataaaaacgattatagtttttcacgtaacgaagccctacattttcgtttcccacctctacgtatttgagagggaaaggggctgcatgaccattctccgctcttctctttccgtaaacggtggtcgtatcgcccaacgcatactcgacagcatccaaagcatcttgaatcaaattatcaatccgattctcttcttcccaatagtcaccattccgaaacaggcaagacataccggcattacaaacgaacagaccatcggcatcaatatcttcacaaaattgtaagaattcatgataaccgaatccataggtactacgatatccccacaaattatattctccggggcgtttcacaatatcacctatcgtttctttccatttgatacggttatccatagttaacccttcgactatgcatccgcccggccaacgaacaaaatcgggtcgcaagtctcgaagcatcccggcaacatcttctctcaaaccatttttatgtccgcaaaaagtgttctcgggaaacatggatacaaaatcgatatatactttccctttatgaggtaacagcaaagcaaaacgaagatcattcgctgtcgtgtcgactgtaaaagctccctcataatgattccacgaaccatcacgttctatctggaaattcttagaaacaactatctgttcttcgcaatccagcaaggccgccgtcactaccgtattcttcaattcttccgtaaacagataaaattggaaattatacctttgtccctctgtaacggctattccccagtaaccgtcattcacaacccatacatcggatgcggacgcacccaaatcgataaataaggcatggggagtagcgttattcagtggcttaacctcggttatctcataaaaaggaggcctcgtatcggaaacacacttcacttcccagctttccataaaaagcgaatcgttccaagcgatactaaaatggttaatggaatcattggaatagcaatgcaaaggtttggcaactgcctttccatctttcaacaccgtgccggaaggtaaagtaccatcttcaaagccacgatttcttatcatttctgcatataaaccgccatcgccagaatgagtaatctcttcaaaaaagataccatacaaggagggaggtatctcggcctcttcccttgacaaatcgatcgttactacatcgacgggctgattgcaggacataaagaggaataaacctccaaattgcattatttttttgatccacttttccacaatctatttccttttatttctaagataatgatccaatgatttcataaagacacctccgaccaccgaacgcgcccgaaagtttatatagtcggcattcaatgtttcataccaatcgcccaaagggactctcgaagaagtctcatttacatatttccaaatcggtcgtatcaactcttgaaaatcaccttccgagtcggccattgtggcactccatacggtatcgtcagttttaccccatgtaaagcgattgtccaaaggcaacccgtatttgttctgggttttcagatagaaagtgacttcctttttcattatacggtctggcaatatattaaggcccaaaactttatcccatacaaaattatacttctggctccaagtacccggcatatcgaaggccaaccgataatgatctccgtcatcggctctccgttcccactcaatggccattcttttagccatttcggtaaatttcttggcctcctccggcttattcaacatttcggccaagcgaccataaccggcaatcgccataatggctttggccgaaagattggcattgtgcgccaaatgtcccgcaaaatcttcggtgcacaactgattttcaggatccatacctgcctcggccaaataattgctccaagccgtcaagatttcccaatgttttgccgcatagtctgcattcccatcggcaatagcgatcgcagtcgtcataatcaacatattccccgtttcttccacaggcatatctccctgataagtttgcccatttgccaaaggatatgtaccgacatcgtgtgcggcaaaaggctttttccaacggcccgactcgctataatcgaaaatgaaatccagcatagctttcattatttctgtattataccgaataaaaataggacaagaaggatatgtcacatcaaccgtaccgatagacccgttgctgttattttccttagaaaaaaagaacaactcaccggcggggccacaaaccagtttatgagccgatatagcttggcgataagaggctgcacaaagttcggcatactgctgtcctccggcttcaacagcgtctttcataaccttataatcccactcgtcacatcgctgcatggtttttttataattctttcgggcatcggccaatgcggcttccatcgtcggatattttttcttccaatacgctttcagatttttcccgaaatattgtacagaggcaatatcgtcataaccgatcatcaaatatccttcggatttccgttctctcacattgcccagattttcgctatacgctaaaagaatttcttccttatccaaacgtaccgatgtccgagatatttttgtatccagcagtattccttttcctgcaaaactctcttgaatagagcggggagttcccacagacatatcagaagattcagataggttaccggccagataaaagtatccccaatcgatacaaataatatcaccgcttttacctaaaacattctgctctaatgtccccgttttcagaatatgaatgtcggaagatcgatagttttctacacttacttcttgatccaaactgttaaccgcccatcggggagtcgcagaaaaataaatctgcacatcgtgagcgcgtttatccaatgaccggacttcataactaatataattaaccgggctactcaataaatccaaatcattcaagaccaatggactcgtaaatttcaagtccaattggacaggaccacaataaaaagaataataggtctgggtaggtaatacgcttacctttatctgttcggcttccgtaccgaaaaaagactccatttcatcatcggtaaataggccgaaatcgacataagctcctcccttcgtattgtgacaatgggctgcaatgagattattttctgcggttagcgatttcacttgctctgcctccaacggttgcacgacataattcctccacttgtatcccgtgcttactaacatctgcccattcagatacagttcaaaaacatcatcgtgcgaataaacaagatataaccgtttcttcgagatattcttatcttcgatcgaaaacttcctacgtatccaaatatccccctgattccactcggttttaacatgaggcatatcgacgctcccgaatgcccccgcaccttcctgccattccgtatcattatactcttttgtataccaatcggcataaggcattgtattcgtatatttggctgtccattcctcgtctcgggcatctttcaaaattgacgtcaaagcctgttcgccttttcccataaaccgatagcatttaccatcgacccttaaaacgcccgtcaaagaatgttctgttcctgtccaatgccgaacctcatcttcatacagcttatcggtatgtgaccacgccgaaatgtaaggatcgatggtaaccaaaggataggccggaactctcaaattagaaacggggacttccttgttattcccggcttccacaaagacaccccaaaaagtagttaatagcaaaaataaaatacctcgtttcataatcctgttttttgtttggtcattctgttactaatattttcttcacgaccgcaccaccattccctcttgttatcctgacaatgtaaaatccgggagcgaccgatacgaatgccgaacaatcggaaagcctcaattctttcactttcaatccttcgggagaataaacctcgacatttcttataggtgtcgcagaattaattctaaaacccaatttacccccaacgacaatcagtttttcctcctctatatccatcacggaaactacatcactcttatccagataaacattagccacgttcgcactattcccgcgccagaccattttcaaacgatgcttaccggatagttctcccaaagttcctttgccaaattcatacttcgttaaagaccctgtacgaatcagttctacgctggcaaaagggaccaattcatttgccccgaacgttttcagacaggccgaatggtttctccaccggacatatacggcatgagaaccagtaatgtttacacttaacggagccgacgcttctttatactctccctctttcgtctgttccacaggaatcgatgccacagggaccgccgtatcttctatataaatatcaaagaagccgtcctcgcaatctccggggtgcgtgtattccaccataaaccggttatacaaaccatgccttgcatccccgaaatcaatatctctgatacgtatcctcgttcccgaactcgtattaattatagactcggtctttccatcatacttagcgccttctgtacccttatcgacgataacaacttgataaaggcctcctcctttggccggaatacgaatatccccggcatatgcaggctttgcggcaacaaggaacgacagaagtaaaaacagaaagaatttattcatgcccatttcctccattcttttcaatatactcttttaacgtagcacaaagatccatgggcaataaaaactcatacgtattcggcaaataactttcgacacgctgtaattcacgaatcaaccgttcatatcctcctactccgccgtaactggccgcaatcagataaacattccgaaaaacaggcttttgcccgttgggttttacacttatcaaatctttatacacatcgccctcttcccaacaatgagctccttgtagaatacagacaacaccttcgccgtctttaccaacctcataacgttccttattattttcaaaaccatcaaaaacgccctgcaaaccacaagtctgcatatatcttccaaaacgttctttattagttgtattccacaggcaagcagtatggaagccggccgtttccaaccatttttgattggtttccagccatttttcataattattttcattgtatttatcgccatagataaactggaatccagagggaccggcgactaattcatcattgggagtcagatttttataaaaatactccaacaaaacgggatttaactcttgcaaagatgcagccattgtcatacctaccggaacctttcccctacccggagcattcttaaacatattgtacatttgattggagtcgaattgtacgttatctccatcgctccatataagactcacatagattttgccgggcaatgcctctatggcttgacccttacgctgttggaaagctttcctcgggaacgagcaccaaaaacttccgtttgcgtaataatcactaaccataaaacctacattatacggattggttgcattattcagagcatccccgtcttttcctgccccataacccattgtggaagaacccggttgatagtccattttatcacaaatcttctgaatcatggcaaattcatcgggatccgagtcgcttaaaaaaaatacaaaccctttggaggctgctgcataatcatatatcttccacgggttggaaacatagtcactacgcaaaccggcagaaaagctcagagacttatgacatccgtcggccaagttatcgatagcccactgataggcctccaatttagtggcccaattattcgaaatgtcttcacattctatattccaatccagttcattgttaaaaaattcctttatctccttagtaaccggaatccctttttgctgtgcacaaatcatttgtgccaagcaccaagtccattccttatcaggatcccaaaggaccatctttttaaaacgatctttatacttatcgaccaacgtagctaatcccgcatatttttcttccgaataatttccccgtaagaggttccacgtttccccctgtttcccataaacgtcttcgaactgtgtctggtgatgatcttcatacaccaagtaaacctccgcattgctctggttcaacacgccctgagcaacggccgccgttattttaccataactgtcatcacccctaacatcaattaccgaaatctggcttaaaggcacattctgatttttgaaaaaaagaccttcctgaggttgtttatcggattcataagaatcgagatggggaagttcctgtgcaattgtaaaatcggtcttaggttccaaaagcatgtcatctaaataaaaatcgaatccggtctgctccgtcggtttcataacatttgccatctcaacccaaacacgagcatagtcccccgaaccgaaatcgatctctcccaaatccaatgtcaaaccatcgcttgtcccttttattccctcatctgtaaaaaccaccgaggtcttggggtcataaacgaccgacaccttcgattcttccataggcagaatcatagcatcctgtgaaggagaatcgatatccccattcgttaaaggagcagcctgtgacatgactgccacagtgctgctcaaaccagatgccaatattatagcatactttacattcatattttataattttatttttcagcagtttataccggaacaacaatttcttttatcgtactaaaattatatcgtttttgaggattagcggtacggactccaatacgcacccaatatttccccggatccaaatttcttacattcttttctaccacttggaaaggtactccgggttcataatcgccacgttcaaattcctttttagctcttatcgtatacttggtttccgaattattcactcccacattaggagatttgctggaaataaaaacttgggcttcgctcaaagtatacaacccctcgtccaaaccttccgtattgacttccttctctgtatcttcaatcgtatatttgatctccaaattattctgtttgctaccggtcaatgtgatttcatctatattcacacgagcataaggtataacggaataatccaatcgggtcaaacgattctctttcaaatacacgacttccggttcgggagcgtaaaatgcgccttctttcaaagtaatccgatatttcccggcaaaaattttcgtattcaaaaaagtgccatcggctttcccccaaaagaatcgggactgggtattggcgtgtcccgcctcttcccaacttaactcataatattcgactttatagctatttgccgcttctgcctgcaaaggctcgttggtcttacggtcgacaacagtcccttccaaaccggaattcggagcttcataattgtcatattcaaaatagttgcaggacgagagaagcaatgccgacaaaccaaatatataatataaccttttcatattttattacgcttttaattataatacggattttgtttcaatttctcattcttggcaatttccccatcaggaattctctcataatacatttttacatcgaatgtataatagtatttattggcagcgacttcctcgaatatatacttctgtttgttaatatcgaaatatggacacaaacccgtatactgcttggtctcgatttctttatcggcaattctccaacgtctcaaatcccaatacgtgtgattttcaaaagccagctcgattctgcgttcgtgtctaaccttatctacggtcaagtcgcttaaagaaagttgcttaatatctgcacgactgcggatatcatttatccaaagcaaggcatcgtccaaatgctgccccatttctaccgccgcttcggctccattcaagagagcttctgcatatctgaactcaatccaatgttgttccgaataattttcgatgacttctgattgcggcatattctcgttcaagtacttgcgcataaagaaaccagtcatattacccgaataatttccacttccgcttttccctacaatatgataaacctgtccgtcattggccgtataaacagcctcctcataattcgtggcattttccttcttgctgccatcttctatgatcaatcccttttgtatagaacaaggctctcccttgaaaatagcattcggataaatgatcgaaccgccaaaacgggcatccatattttgaaacagctccgaaggatcatcgaaataagtgttcttcgctctttctgcgaaatttgcaggagtaccgtctttgtgttcaaacatttcaacaaattccaatgtagggttcatattggaagaaaaaccgtttccacggtattggtaaggaacgaaataaacatcccagccatgtgcgtttacattgcgttggaaatatttacagaaaatattctctgggctgtcctcggcaaggaacagctcggcaaaattcttctctttatccgagttcttcctatacaacgaaaatctcttcgatttttcaagttcctttacagctttataagctaattcgaaataatcgtttgccaaagccttatcgataccgaccaaaccattcaaatcaacggttccataacgcgcgatactaccggcatacagcatagcgcgagacttcaatgccaaagcagcatatttggtggcacgtccttttcccaaaatctcctcattatcgggcaacagacggaaagcctcgtctaaatcttccgcaataaaatcatagcaggccttttccgtatctctcggtactttcagcgattcaatatcgcctacatactcttgcggttctctcaatataggtacaccaccatatcttttcaccattgcaaaatagcagtaagcccggataaaatgagcctctcccatccatgcatcagcaagaaccgtattctggaaattggatttataggccgggaaatttttcaaaaagtaattcacccgacgaatttttccataatcccaacagccccaccaagttccatcaccgatggtcgaaatatcatcgctggaactacacatagcctcacccgatacattcggtaaacgaccttgccctttacccgatacattgaatccttgttgtgtatagcgaaagtcctctatgggtaagtcatagtaaagagtcgtcatataagacgttatacccgattctgaattaaaaatcgcatcatcttgtataatattaatgggcggcacatctaagtaatcacacgaataaaacgatagggccatcaccaatgccgatactaatatcttatttattctcatcgtatttcaaattagaatgataaattcaatccaaagttaaagtttctcataatcggatacaggtatccataattcccttccggatgctcgggatcgacgaaatccaaattagatagcgtaaataaattatagccatttgcaaatatcctcaaacgatccactttgaatttacgagtgatatgctggggtattgtatagccaatttccacgcttttcaaccgtaaataagaagcatcgtatgtcgtctgtttacatcttgcataattcacgctataagatccggcatcacgggtcgtaggccattttccgggaatccagttcccattttcgtcctgacgatatctgtcataaaaatgagccaaaccgtttccaccgaaacacaacgggtattgcaattgctcgaaatagatcacattgaatccaccaccgccttggaacaacaggttcacatcaaaccctttccactcggcagcgatagtagcaccgaatgtcattttgggatttccgttatcattggtgtgctcgtacacgttcggataaacatcattgtcatcgatgattccgtcgccattccagtcttcatatttccagtcacccggcaactgggtagcaccaccctgaccgtcttgaataggcgaccgccaaatatcctccatcgaagtaaattgtccgtttgagccataagcccaccccatatcggaatatcggtttgaatatttatttctccatctatcataggaattcactgcatccccttcctccaaatgtctgttctgacgacgagtcaatgcaaaattcaaacttaccgaatagttgaaatcattaatcttattgcgatgtcccaatacgatttcaaaacctttatacaaatcttgattcaaattttcttccggcaattcagcacctatagtaccgggaacttcaccacttctctttcctaacagaccatctctgtatctccaaaagaaatctacctgtgcagacagcataccattccaaagatcaagatcggttcccacgttcaaggtcttcgacttataccaagttatcagttcattcggtagacctctgaaacccaatcctttatagacaacatcgccgaatacataactggcgcccggataatcatatcccgacaaatattgataggacgaggaaccatcgtcacccatagctccataagatgctcttaacttccaattcgtaataaaggacagcggagcaaattctttgataaagctctcttccgaaattctatatccgacagaggccgatgggaaaaatccccaacgatgtcctttggcaaacttggaagaaccgtcataacggaagctaacttctgccaaatatttggattgataatcgtaattgacacgtccgactagacccatattcgttacacgataaatctggccagcatcggcattaccgatttgctcttcttcggagcctgcaaaaatctcgtctacggcatccatctcgaagtttctttttgcccacaagttatcctcttcctttgcactttgttcgtacaaaaacaagactttcaagttatgtttctctgcaaaaagacgctcatagttcaaagaagcctgtaattgattctgtgctccctcccatgattttctgtaaatagaagaaggcgatgaatatatctgagaattataaacatctttctccctatcgtatttatataatgtatattgtttttgaaattctttctgttgatagttcttataatcataagcatacaaaaacttagcacttaatcctttcaaaaaaggagctttataagtcaatgtaaatgtagtattcaaggttcggtttatcctacgcttataaccggattgatcggcatcggtaatcataagcggattcaaaccatacatcacgtcattaggaaaactctcattattattggcatacggagtttccgtaggtttaagcatccaaatagctttgaactgttcccaagtatctttataaggttgattcttttcatcggacatcgcaccgatcaacaattcggctttcaaatcttttgtaacatcgaaactcaaattggaacggatattataacgatggtaatttaaatcgccggttttccaaataccgtcttcgccatagtaaccaaaagaaaggaaatattgtgtacgcttcccgcttccgctggccgttacattgtgatgggtttgagggaccaaatttttcatagccaaatcataccagtcggttcctccctcccggcggaaacgagctacatcttcttccgtgaaagtggtattaatacctctacccatatttttatcagcttcacgaacaagctcggcatattgagcagcatccaaaacatcaggcaagcccgacggattctggaaaccgaaacttccggtataatcaattcgggtcttaccgctctcacccttacgagtcgtcaccaataacacgccattcgatgcacgcataccataaatagcggcagatgcgtctttcaatacagacacgctctcgatatcgttagcttccaaccgctggaaatctgacacctctcttacgacaccatcaataacgaccaaaggagtacccaatccacggatatccatcttggcatcataactacccggctctcccgtacgttgttgaatacgcacacccggcaatttaccggccaacatattttggacattcgaagtgggtgtaacggtcagttcatctgttcctatcgtactgactgctcctgttaaagtagcttttttctgtgtgccgtaacctacgaccactacttcatctaatatctgatcatcttcacttaaagtcacattcactacggtttttcccttcaaggcaacatttttcgaagcaaagccgatcaatgagaatttcaattccgctttgtccaatttgtcaccggatacattcaaattgaaaataccgtctatattcgacatcgtaccggtattagttcccaccactacgacattaaccccgggtaaaggttccccggactgatccctcactacccctgaaattttctgctgttgatcattttctgctaaaaccgtagcgcagcctaccacaacaaaaaataaaaataggaatgaatgagaataatgggaaagcattgaaaccgccttttccatataaaagaaattgttttttttcatgcgtcctgttagattattgttattcaaccatttccttaacaagcaattgcaattttagaatttaaaaaagataggaaaggagaggaccgactaagcgaatcctctcctatttgattttttattttacaaccttaaatgcttgggaagctccggttgaaacgatattgactacatagataccttttccggtcaaagaaatattctctattgtattttcagctatttgtttagccaccaacacaccattcgtcgtatagacatagatcatttcatttccattcaaaccttctgctcggataccgtcggtagtcacataaacgttataagcggctttttcgacatttgtaactccacttgtgcttgtttgccatttaaataccggataaggagagatagtgggatctattgtccatatttcatcaaaatcccaacccatatcgtctgcataaaacgattcggtcagttcctctaccgtttctccattatcggtatcgattcccgttccctctgttacggcttgaccattcaataaaaccgaagagtgcgcataattatcagaaacatctccaccgtttctctttcctacaacacgatgtgtcacttcgacttcgcctataatatccttgttcaaagacaaacaggaaataaccgcgccaccatcattagcaccgacaataccaccgacattggttttaccttcgatagtagaagtcgaataacaatacatcactgtggcatttccagaactaacgattccacctacggcatccccggtctcaccatcagtagacttagccattacattacaatcggccgtataacagtctgtgattacagtagtaccggcacaaggcccaacgaggccgctggaattagaacctgttccaatgttcgaacaagaactgttgataactcccacttgctcaatcgtagcattacgagttaatcccgtcaagatacctaaacgcccgccaccaatgacagtcacattatcaagcaataaatttctaatcgtaccaccgtcaacaacgccgaaaacactcatatcatgcgcaccggtatcatctccatgcttagccatcaaattggaaatcttatgcccattaccatcaaacgtaccgctaaaacgttggtccgaaccatctccgcttccccattctcctaacggccaccaaccgccttctttttcataagaagcaaaatccaaatcggccatcaatttaaaataggagccccgattctcgcgtacagcatcgaactgagcttccgtctcaatcaaatagggatctgactttgacccagtacccccggcatacaaatcactttcctgtgcccaaacactcgaaaccagcatcatgctgcaaaaacaagatgctacaatctttttgtaatcattcttttccatgacattaaaactttaaattattaataacactttatttaatagcggatttcggacgacaatccatattcgccccaaaatccttattcggtttatttcccattgtaataaccaatgttcccccattcactatatcggcatgagagatgtaagacttatcatacggtcgaccgttcaactgaaccgactgaatatatttgttctctcttgaattattgaccgtccttatttcaaacaccttattttctggcaatttcaaagcgaccttatcaaaaatcggtcttccgaaaacatagattccattagaaggattgaccggataaaaacctaaggacgaaaacacataccacgaagacatctgcccgcaatcctcgttaccctgtaacccgtcgggtgaatcatgatacatttgtgacaatatataatcgactttctccgccgttttccactgcaacccagcatacgaataaagatatacggtatgatgtccgggttcattgccatgtgcatattgccctatcagaccggaaatatcaggagatgccgcatcgcccaaatcggcattaaccgaaaacaaactatctaatttcgaaacaaaagcgtcatcaccacccaacaaagaaatgagaccttccacatcatgagggactaaccatgtatattgccaaccatttccttcgcaataagcatcgttccgatgagttgaatgaacaggattaaacggagtaagccaagaaccatcttgattttttcctctgaaaaagcgggtgtccttgtcccaatatttttgatatgccaaagctctcttcgaaaaatattcatagtcatctaccttacccagctttcgagccacttgtgccactccccaatctgcaatggcatattccaatcccttagctaccgattccttctctttatctgccggaatatattcaagttttgtcacatacgataatcccttataatcagacatcattgaagccttcattgcttgataagcccgttcgtaattaaaacctttcatatttttcaatatagcatccgctataacaggaaccgactgaatacctatcatttcattcgtgtccgagccatacaaatgccaaaccggcaaacgtccttgttgctcataaatagccaacatcgaattaataaaatcgggaacacgctccggctgcaccaacgtatataatgggtgagccgcacgatacgtgtcccacaatgagaatacggtataattggtgaaacccggatctccatacacatttttgtctgtacctctatattccttgttacaatcattgaacatagccggttgtataaacgcatgatataaagctgtataaaaaatacgtttggctactgtatccgtagtcgatacttgcagtttggacaattcggcattccatttggcagtcgtctcatctacaacccgttcaaaattccaatcggcgatttcttgtcgaatattagccgccgcattttccatactcaccggcgatattcccactttcacatcaagtttctcgacatcagatgcgacaattacatttcccttcacgtcgatgccttgtaaaacatttccttgtaccggtatcgaatcgtgaaacaaagctaaacgtatcggttcggagaaaacagccgtaaaatagatttgctgttgcttcgaccaaccagaggaacaacgataaccactgacagtagtatcgttcacttgttccagatatgtatcggtaggacgatcgtcaccattggcatcctttaaattaatcatcacatacttttcgacattcttcgggaaagtgtatctgtgaaaggcaactcggtccgacgccgtcaattctacttttgtacgatgagttttcaatactactccataatatccgggtaaagccgtttcatcgctcttagaataataagaagcataacccgataagggattatcttgggttcccggctgcgtacgcattttccccgtatatggcataaataacaaatcgcccgtgtcgctacaaccggttccattgagatgcaaatgtgaaaatcctattacaatcgaatcggagtaatgataacccgaacaccaatcccaccctttatttatattgttaggaccgatctgcacggctccgaatggagcagcgactcctaaaaacgtatgaccatgtccgccggttcctatatacgggtccacataatttaccggagcaaatatcgccgattcgatattttcgtcttttactctacacgatacaagtaaaaataaaatagaaatgaatacaattaaaggttcttttttcattacagcattttatgtgtgtgagacaaaagtaagattataatattaacaaaaacattaataatacattaagaatccacgattcaagcatacataaagtagattttttactaccgaaacattaacaaaacattaatattcgagaggcatcatttttcaattcacttttcccgttattcctccgacattcgtaattccttctatccgacaagtcgagtaacaatcgatgatttcgctatcttcactcatggaactggatataccacccgcacaatccttcgcataaacatttccacccttcacagaacagttttttaccaccgaccggtaaagtggacctgtcaaacctccggcattcgacccatgatccgataatcggttttcgcattggctatcgagtatatcgacctgttctatctttgtagaaaaggtagcgcctgtcagaacgcctaaacgcccctctccaatgatgctgcaattttcaactttcaagttgataatctctgcaccttctgtcacaccaaaaatactcaggtcatgagcttttcgttccaccgacaaattcctaatcgaatatccacctccatcaaaaaagccacgaaaacgctccatagcattatctccacttccccattcgcccaaaggccaccaactttggccatcttctctgacataatcagaaaaatcgaggtcgttaatcaatcgaaagcattggcctctatactcccttatatggtcgaactgttgcggagtagaaataagaaacggatcttccctactccccgtaccaccggcaaaaggagcagtttccttcaaataaatccgcaaaagctcaaaaaaagacggggcatccaacaaacagatactatcatctatttttttcagttcctcgactacctctacataccacgtgggagattttattatatttctaaaccaatgaaaaggcaacccctctctctcccttattctattgacgatagccaccgcagcatctttgggctcgacatcattgatatcgtaatcggccctcaacacaggcatatttccaaaaagcatactccacgaagatagtttctgaggaacgattccattgggactaaacgatcgataacattccattccttcccaattcaaaccgggagcataaccgtcgacaataaagccggtaatgctcaatccccatttctcataatagggcttgcagtgctccgcccacgattgtaatccagaaggtaatcccgaaataggtctgggttcttgtaacattccggggctcaaatatccggctccattatccgatgcgacaaaataatcattcttagtagccgtttttctaaaattatgtaacacatgaggcacgcgctcctgtaataccggacttatggcccacatcatcgggacttttcctctattggggtcgtcccaagtaagtgaggtaaattggctcacccacgatgacgcatcataatcccccacataaaatatcagaaagttccttcctttcacgtcgactttaccgtcttcggtcaacaatcctctttgcttcaactcttcatgagtaacccacggttgcgaataccgttcctccaaagggaaatgctgccaaaaagaggcatttgccaacgctccgattgcaattgcatcggcatctttaaaagcgttgtaagcgctgataagacgtaaaaactcccactccgtaggaacatcgtcgtggataccaccggcatgcttcgtgtatttaaatgcccatgaggggaaccctcctatatagcagtacttttcacctttattctgttggtatgccaacaatagcatttctttaagggtagccaaatcagtccctaccttttgagtcggttcgtctgttgccggttcgtctccccacggtgataaatcgaaaaagaaagctcgcttgctaatgaaaaaatcatgattagaaagcgtatgatgattccgtaccgtagcaccgggattttgtttccaatattgatccagataataagcggcatattccgtgttacacttgccagttttcatataattctctatataccaaatgtacggatcgttttttatagagcctgtgctgtttcgattcgtccccggaatcacccccgatcccgtaaacataacacttccatcttcattgatcaatctacgctttactttcaatcggggaccacccaaaactaagcggctatacaaactctcggaatcaagatcataacggatcggcaaaaggtcttccgcacccgcaacggcagaagcgacattgcttgtggacggaactctctcatcataaagtaccaccccctttatgtatccggcgtaagccgacaccaagtcttcaatggtattatacgtcaccgtttccttttgatacaaccactgacctttcctacgatacttattcaaccaatatttatcaatatccaattgatccctatccacaaaaaagacatatagttgcggagcatcccgattgacgattccttgcaaagccgaaacgacatgtacatcgtcccaagcgacattgcgtccctttggtgtcgacaagtcggtttccaaagtataatgcaggtcataaagccctatcgcctcttgactggctgccttatagcaacccaatacccaaaacagcactccatagataagaactctcttcatcatgcgactcacctcttaaattttcagactttttataccacgtcatcaagatcacctccaccgattttacttttcatcaagcagtaaaaagtagttttcatgaggtcaaaacatggtcacctccggtttattcgaaccggaacacctcgaatgtacatgggatttatttgattcttacttatcctcgttagtcaaagaatacgggaaatcttcatcgtttattccgcgctctgtattaggcgtatgactcatatcgaaatcaagaacagcgccgtccatcaattcctcgtgtttcaaccaattgtggttatactctttcccgttcattttcagagaacgtatatatctattttcgttcgtgttgtcgggagcattcaaaacgatctgctttccattttccaacgtaagaatcgcctttttaaagagcggagctcccatcacatactcccctgagcccggacataccggataaaagcccaacgcagaaaatatataccatgcagaagtctgaccattatcttcatctccacaatagccatcaggataaggagtatacagcttatccatcacttcccttaaccaatattgcgctttccaaggctgcccggcgtaattataaagataaatcatatgttggataggctggttgccatgtgcataattgcccatattcataatctgcatttcctttatttcatgaatgcactgcccgtaataactatcgtcataaataggaggaaccacaaaaacagaatccaacatggagacaaagttctccttccctcccatcagatcgataagtccctgcacatcatgaaacacgctccatgtataatgccaactgttgccttcggtaaaagcatcgccccatttatacggactgaaaggagactggaatgtaccatcttcgtttttcccacgcatcagattgttctctttatcgaaaacgaaccgatagttcttactcctttcccgataaagatcgatttcttcctgcggacggttcaattgttgcgccagtctcataatacaccaatcatcataggcatattccaatgtgcgcgccacattctcgttaatacctacattataaggtacatatcctttttgattgtaatattcatatcccaatcttcctgtcgaaggaacttggggatgcacatgattcgctccgtgcagaacagcctcatacaacagatcgatcttttctgcctggcatcctttcaaataagcatcggccacaacagatgccgaattattacccaccatacagtgacggtgtcccgggctggcccattcgggtaaaaatccactttcttcataactgtttgccaatccttcttgaatttctttgttgacagaaggatacatgaggttcaagaagggaaataaagcgcggaacgtgtcccaaaatccggtatctgtatacatatatcctctcctcacttctccgttgtaaggactataatgaacaatatttccatatttatctacttcataaaacttacggggaaacaataaagaacgatacaagcaagagtagaaagtacgtagttgttcatcagttccctcttctactctcactctattcattacatcgttccaagcatttcgagcagactcttttacctcgttaaaattcctactgtccagttcttctaaattcaaccatgcctgctcttcactgataaaagaagaacttacctttacaccaatcttttcacctttataagtcttgaatcccaacacagcaccgacatgattatcttctacctctcttttaccttttataattttatctccgctccatacttctgccgaggcaaaaggcttatcaaatttcatcacgaagtaatttctaaaattatccggtactcccccgctatttttagtcgtatagccggttaccgtgccattttcctcatctatctgaacaaaagacccgttatcgaatgcatctactacgatatacgactcttcactttctgggaaagtaaacctaaaataagcagaacgttccgtcggagtaatttctgttttcacatcatggtcagccaaatacacactataataataaggtcttgccgtctcagctttatgagaaaaccagcttcctcgttcattttgcaggaactttttaccaccggtcaccggcatcaatgcaaactgcccataatcattgatccacggactgggctgatgtgtctgcttaaatccttttatcttgtcgtcggtataacaataggcccagccatttcccatatctcccgtttgcggtgtccagaaattcattccccacggtaatgcgacagccggataggtattacccgtagacaaggtaaacttagattgagttcccactaacggattcacatagtcaaccggtgaaaaagaagtaaaaagcacctctttacctccgcacgatataagtaaaacagataaaaatacaagtaaagaaacttttttcatggaatcgtttttttattttttgcgacaaaagtaagccggggtaattaatgaaaccattaatagaatattaattatccatatgcaatacttatttccgaatcaaaaacattaataaggcattaacaattctcataagaaagggggcgacataacaagattaataacaaggggaaccactcgacaatcagtataaaaacgattctttcaaataaagctatcgaggtcaacgttattgcctcatatctttccatatattttactgtaaatagtcacgtgtagaaaacaacatcacctcaaacaagaaaaacaactcaatgaaaattttcttgtttgaggcggtgatacatttctgatactattcgctaatccgtaagcctattgacaccgacaccgtcgaaagtcatcttcaccggtttaataaaaccattttcgtcaaaatacatacggtcgatacaaatctctctatgatttggaatcgtatcgcccaaagggtgacgatgataaacaatataccactcgtctttccccggtatctgaatgaccgaatgatgtcccgcacctgtacccacactctcgtcttgttgcaatattttcccaatacgctcgaaagggccgaacggagaatcggcaatggcataagccacgctataatccgaacctccccaactgccttccgaccacataaaataatatttgttattccgtttcaacataaaaggtccctccacatagttctctggtgtaacagatttataatacgaaccatcgtcaaaaggaacgaggctcaataaatccgaactcaattttaccatattacaatgatgccagcctccataatacatataataactaccgtcgtcatctttaaaaacgaactgatcgatcggctgggcgccgttcacaatcttatcgatcaaaggtttccccaaaacatctttaaatgggcctgccggattatcagccacagcgacaccgattccaccatattgctcatcattctggatatcattccctccgaaaaacagataatatttgccattcgcccgaacaatagacggagcccataaggcaaattccaaccactttatattctcaacagacagcactttgggatgcttagtccagtgaaccatatcttttgatgaaaaagcatccatataagtctgtatattatagacctgatgaatggcccgcgtttctttttgcaatctgggaaaatctgcgctatcgactccgaaaggaatatcggacaacgtaggatatatccaatattcatcatcgaagacaaccccttctggatcggcataccaaccctcgacaataggattgccactatactctttctcatacttacacgccaccaacagcagcgctaaactcaatacaataatacttctcatcatgtgtcgtttttaattaatgtaacaaaaataaacgccggccgttaacggaaatattaataaaccattaacaaacaaacttcggtacacagtaaaaatactctgtccattaatagtctaatatttttattatcaattccatgaaaagattccataaatataaaaaatttttttgtaaccctcccaaaccatattatctttgcaaaaaacagttataagtattcatgcaaaagacgcttatatttctgctcttaatgttggccctgataccggttgaagcacaaaatatttcatctggattatattttgctgcccatacctccattaaagaagaaagaacatcgcttatcctatctcccgagttcgacgcctcaaaaggtctaacattagatttcgatattaaattcagacccgaagaacataactacggatatgtctttcgaatcataatcgacgatgaaaagagtttcgatttgatagcgaatattacacccgaaaaaagagcgttgaatttgatagaagggaacaacgtctatctggctttcgatgaagaactactgaatcaatactcatggaataaatgggcgcatatccagtgttcaatctatccggatagtttacggctcatcttcgacaaccaaacattgcaaggccagtataaatccatcaatatcaaaaacgtgaaattctacttcggatactccgatcatgaaaagtttcattcttccgatgttcctccgatgtctatacgtaacataaaaatcacagacaataaaaataaaacaattgcatattggcctttaaaagaacatctgtcgtattcctgtttggatagtctgtatcagattccggcgacagtcaccaatcctacatgggaaataaataaacacaccaagtgggtaaaagaaaaaacattagcattacccatatatacacaaatctgccatgccccgtcaaaagggaatatttattttgccaacagctcatttgtactcgtttattcgactatcgacaatacattagatacgatttatcctgctcatggagctccatacacagaaataaacaaccaactcatttatcagccttattacgatgaattatggtcatacgatttcgatcccttgaaacagatgtctatattcaatttcaacgataacacatggacaaagaatgaccgtgaaataaaaaatccggaatattctcaacacaatacgtttatatcgcccaatgactcgtgtctgtatatttttggcggatatggtaattatcaatataagaacttgatacttaaaaaaggacggacacaggacgactggattccggtatcgtacaacgaagaaatacctccgcgttatctaagcggatcggactacaaaaacagagacacgatattggtgttcggcggctgtggcaacccgcaagggaaacaagaattaggagtcataaattattacgatctttatgcgatagacatcaacacattcaaaacaaagaaattgtggactatccccaacgatacgaaaaacttcgtcgtcggtaatcatattgttacagacgaaacgaataacaagctatatgctttatgttttccgaatgattgttcgaacagctatatcctgctaaaatcgttcgatttgacagatgggaataactgtacgaactatgcagatacaatccctttctccttcaatgatgtaaattctttctgtacactctactacgactcgttacagtcgaggctgtatgccgtaaccaattataactacaacaataaatcaaatataaacatatactcattagcttatcccccgttaaaaatagaagatacgctgcaaacagttgcaggacataaggctcgtgttacaaagatagggttcttcataggtataggaatttgcataattgcaggtatgggctgtatgtacctctgctaccgaaaaaagaaaagaagaagaaaagaaagccacattcctcacaaccctccggtcgttacaaatacggatcgttcttccaagacaactacccaagacgaaaactataagccccaaccggacattcacaaaaaatcatctattcttttcttagatggatttcaagtatgggataaaaatggtgcagatatcaccaaatcattcacacctattttgaaacaactgctcattcttatcatattatatagcgtaaataacaagaaagggatttcaaacgtcactctgagagagttgctttggtttgataaaacagacgaaagtgcccaaaataaccgccgagtaaatatccgaaaactaaaacttttgctggaaaaactagacggtgtcgaacttgtaaaagaaagcacctattgggcgttaaagttcactcacgcttattgcgattatatcgatgtttgtaattggatcgacaaagtaaaaaacaaagaatctatcacagccgaaaacatcaatgatttacccttaaacctgctatcgggacaattattgccatatgtccaaacagactggttggattctttcaagtccgattacacgaattccgtattagatatggcaataaatttatccaagcaagaatatataaagggaaacaacgaattattaattcagatagccaacagcatgttcgcacacgacaaaacagacgagtatgcattgattctcaaatgcaacacattgtataaacaaggaagaaccagcttggccaaaacgacattcgacacattctgcaatgaatataaagcaatgctgaatacgaattacacaaaaacattcaatgaagtaatcaattgtcaattgtaatctcgcaactacatagaagaataaaaatgaatgctatcgtttcgtaaaacgatagcattcattttttcaataggacatacacccaagcaccttgtacccacctatctcctttggcgagcttgttataaacaacctacacccagaaaaactcatttataagtaagacagacaaaaccttcttgcaaaaatggacgttcatcgagaccggtcaataatcgtccacgtatatatttatatcggactctcgttaaaatacaaaaaatatacaccgaaaaaattttatatcctgaatatttctcaaaatcgatctttactttccctcgtcaatattaaattattgaaccttctgaataataatttgttattacaagaaaggacaattcccaccgctacgctacacctccatatagacaaatgacacgagaaagaaaatttatacaaaacttaacatattgaataaaaagcaattaggcaattagccacagaaaatatacatttgcatctgaactcgtgagagaaacaaattaattatatgaaacaattcattcgatatactatattatgcgtcggatacattttaggctcccaaagtcttttgtacgccgaaacgccaaccgatagtataaatactattcctaccgactcgattatcgcaaaaaaagataccaccgtaaaaaaactgaacatattccaaaaggttctgaaatacttcgatgactccaatgccccacgccccgataaaaaattcgatttcggtatcatcggaggacctcactattcttccacaacaaagctgggaataggcttggccgcctcggggacataccggttacgaagagactcgatcacacaactctccaacgtttcgctttatggagatgccacgaccacaggctttcttctgataggagtaaaagggaataatatctttcccaaaaataaattcaggatagattacgacttttatttatacacattcccgagtgacttttggggcataggttacgaaaacggaaataacaacgccaataaaagctcctacgacagactggaaactattttacgtatcgactggctggctcgcttacataaggacctctacggaggaatttctacgggatttaactgggtgaaaggatcggatttcacaaaaatcgaactactcgaaggagaagcccgagaagtaatcagcacgagtataggagccacacttgtatacgacagtcgcgattttattaccaacgcagcaaaaggagtttatataaaagttaaccaacgattcttccccaaattcttgggcaataaaaaagcgtttactcgcaccgatttcattttcgattattatcaccgcctatgggaaggagcgatccttgcttttgacctacatggagaattcaattacggcgatgtaccctggaatatgcttgcagctttgggagggtcggcccgtatgcgaggatactacgaaggcagataccgagacaaaaatttaatcgaaactcaaatagaactccgtcaacacatttggaggcgaaatggcatagccgtatgggtaggagcaggaaacgtatttccttcgttctcaggttttaaatggggacatacactccccaattacggaataggctatcgctgggagttcaaaaaccgagtcaatgtacgactcgactacggattcggaaaaaaaggacaatcgggatttttattcaacatcaatgaagcattttaatcaaatatttacacagaggcgcatattttggattttttcgggaatcatgttggttcccaacatttttctatgttttacagaacaattgccactcctgttcaaagtctcctatatcctcattccgggagctttataccttttgttattaattctctcccgcaaaccgggaatcaccttttgggctctttttccccttcatttcataggcgcgtttcaattggtactactctatcttttcggtaattccattatcgcctcagacatgttcctgaacatgtttacgaccaacagcggagaggctttcgaattactcgataaattggctccggcggtagtaggcgtattcttactttatcttccggcattggctcttgccgtttactccatacgtcgcaccgagaccctcacacctctttttcaaaaaagagtgttcatgttggctatgctcatgatcggtagtggaatacttgtttacacacctgctcaccgaaaatatcctcatacggcaaggctcgacaacctttaccccatcaacgcgttcaacaatgcccgattcgccgtggacagttgggaagcagcaaagaactatccacgcacatcgagaaaattcgactaccgggccacatcgacaagagacaccgaactccccgaaatctatatcttcgtaatcggagaaacctcccgcgccggaaactgggggctatatgggtacgaacgaaatacgacccccaaactcgatgccatgcccgatgtcattcatttcgacgatgtactgacacaaatcaatgcgactcataaaagcgttccgttaatgctatgccccgccgatgcactcaattacaatgagatataccgacaaaagagtcttatttcggcatttaaacaagctgggttccacacgtcgtttctctccaaccaactgcgcaacggatcatttaccgagttctttgccgacgaagcagactgtacgatctatttcgccgcaccgaaaaataaaccgcatctacatgacgatgtactattatccgcagtcgactcgttactgaacataggtaaaacgaagcaactcattatccttcacacctatggctcccacttcaattactgtgaacgatacgataccgattgccgaatattcacccccgaccacattaaagaaatcgatcataagaacaagcaagccatgataaatgcctatgacaactcgatcgttgccaccgacaaattcttggcacaagttatcgataaactcgaccgaaccggagaaacttcggccatgctgtatctctccgaccacggggaagatttgctcgacgatgaacgtaatcgatttctgcacgcctcccccattcccacctattaccagcttcacataccctttgtcatttggttctcggataattactctactcttttccccgatgacatacgacaagcccggaatcggcataccaccccattcgactcgcgagtcgtattccacaccctactgggtatcggaggcatcgaaaccgaatatcgcgatgaccgactctccctcataagtccgtcgtttcatctcgaaaaaagatattatgtaggagaacaaaacatacctattcccgttcgacgtctgcccctcgaagaagaagacttacaagccttcgaacgatacggaatctctccccgataatacaatagcatccttgattctctttacttctcctaaataaaggagaagcgaatattcatatttttatattttataactattataatagaccgacaagggaaagcaataatcaaatatttattacacaataaatattatatacactattatactttcaaaaatcaagaaattcactttaatataagacaaaagctatttttaaaaaatctatattttaaatcaatttcagagaaatcagctccaaattagttaaaatagcataaatacaatacaggtaatacgacaatatcgatgtattatttaatattataaatatttttgcaaatagagtttcactacaaaccaaaaatattcattatcaattctttttcattatgaaaaaaaatctaatcacattttgctttttattgctattatttgtgccctttggtacaaaagcgcatctgatcgctccacggaacgcatcagaaaaaacgactgtcattccggcctcccgaatctcctctccaaagggacttacaaaagttttggaaaacacagtcgacggaacgaccctttatgggaaccttatctttgctcaaagttgggggaacgattccagtcctatgggtatctacaaattcaatacgacaaacaaccctaaggcagaattggtatatcgtcccgaagccggaccgataggagccaatggaggagcgactctcgtcgacgcaaaatatttctactgtattacctatacaaaattaagcggtacgacgataagcaacgaattgatttgttacgacatcgaatcgtggacagaggtaagccgtaaagctatacctttaacgactatttccaccgacatgacttggaatccggcagaccaaaaagtgtacggagccttctacaacacgactaaaaacggttatgtattcggaactctcgaccttgaaaccggtgcagtaaacaaactatcggatatcactctgcaagacgacaagggatatcctgccggattcgtagtcatcgcagccaattccatcggtgaagtatatggcatttcccaaatgggagatttatacaaattcaataccgaagacggctcatatagccttatcggagctaccggatacacacctctttaccaacaaagcggatgcttcgacttcacgaccaagcaactttattgggcagcctgcaacgaaaattcctccggtatttatcaagtaaacaccgatacgggagaggctacactactcgggtcctttaacgatttggaagaatttgtgggactatattccctaagtcctaacgcagacctcgaagggccgggaagcgttaccgacatcgacatcgcattcgaaggagcagccctttcaggtacaataactttcaaactccccactacgactgtcagtggtaacaaactctccggcgatataaactacaccgttgaaatagacgatgaaaccctttcgtcaggcacatcaaccgcaggttcgcttgtcgaactgccgataaccctatccgaagggaaccacactttggaaatcacgacaaatacaatacatggcacaggtccggcttacaaggcctcattctatgtcggcacagatactccggcaacggtcacaggaatcacggtcaaccgagaaagcgacaatgtaacagtcgcatgggaagcagtaacgaagggtcaacatggaggatacgtagatataagcctattgacttataacgtcatacgcaaacccgacaacaagattatcgctacccgaacgaccgaaacgaccgtcacggatacagagctacctctcattctgggtgaatacacatacgaaattatagtctcagacggcactcgacaaagtgatcccgctctatccgacggaataatgctcggttcatatctcgaaccaccttacaaccattcgttcaagtcgatggatagtttctaccaatatactatcatcaatgccaacgaggacgacaaagcatggacggcaacggtcaacggtgcacaactcaattatagccgcacactcgccgccgacgattggatcgtctctccggccatgaagttgaaagcgggtttcctatataccctcatcttaaaaggacgttccagtagcgccacttacaaagaacggtttgaagtaaaatacgggacagaagcaacagccgacgctttgacaaacgtcatcatagaacctaatttcttcacgacctcaaaagaagagaccttccaagctgtattctcgcctcaatccgacggaacatattatataggtattcacggtatcagcgataaatacatggggtcgttatatatctattccatcgaaattacagaaccgatcaacgcgcttgccccagcagcgacagacgaaatgaacgctgttgccgctcccgaaggagcgctcggagcgaccatatcggcgaccgccccctctaagcgagccgacggcagcaacttgacaacaatcgccaaagccgaaatttggaacaaaacaaaagaaagacttgtaggaagcatcgacaatccacaacccggtagcgaagtatccataaccgatactcaggctgccaacggattcaatacctactcgatcgcattctttaatgaggctggaaaaggatacgaaacagaatgcaatgtatacatcgggatagacattcccaccgctgttataaacccacacgtagtacaagccggagacaaggcagtacttacatgggaagcacctgtgacaggtatcaacggcggttacatcgaccccgaaaaactgacctaccagatttcgcagttgcagccgatgtctgtttcgactgccaccgaaataaccggacttacctataccgacgaatcattgaacgccgattcgggacaaatgcttctaagttatcaaataagcgcaaaaagtatcgcaggcgagggcgaagccacacctaccaactccatacttttcgggactccctatccggctccattcacagagtcttggcctgagggtaaaaccgaaaacgacccgtgggcaatcgacatcgtcgaaaaaggatatggcgattggtcggtaacacagaccagtttctccacaatattaggagcacaagacggcgatgacggttggatttcgttcagcggacccggctcgtaccgactggtttctcccaaaataaacgtcgctacactcgaaaatccggtgttgaaaatatgggtaaataatcccgacgggttatccgagattcatattcaggcaagtgtcgatttaggtacaaattggacaacgcttctcgaaatcaacagcgcagacaataatatatggaaatgccacgccatcgaccttagtaactatcgcaacgcagacttcctgcaaataggtattctcggagcaaccgaagattggggcgccgaaagcgtcatgatcgataacctgcgaattttcgaccaactggcaaacgatcttgttctgaatggatttacaggtcccgaatcggttatcggggcaaagccggcagactattctgtcaagatatataacgatggaaccaatgaggctaccgactacaaagtatgtatctattcgggagacaaactcattgcggaacaaaacggtaaacccatacgatccgatgcctacgagactttcgatttcgtcctttcgtcaccggtaaacagtacggtcttcgacctcactgcaaaaatagaattcgatggcgatctcgacacagacaacaactcggctgcactgtcggtcgcagtcgaacgacccaaataccccaccatcgacaacctcagtgccgaagataacgacaactcggtatcgctcacatggagcagacccgctttatcctgtatccccgatcccgctaccgacgacatcgaaagttacgaagagtggagtatcggcggaattgacgacagtaatcgtaccggaaccatcggagactacacggtgtacgacaacgatggtcaaacgacggccaagataaacgcatgggctccccaatacccgaacagcgaagcgaaaatggcattccaagtcatgagtacgaactccgaatctctgtcacaacaattgactttctatggcctcaccgctcactcgggcaaacaattgttcgcttgttggagtactatgggaggagctgccaacgacgattacctgatattccccgagcttaaagatggcaatagaagtatcagtttctgggctcgctcaattccttttatgtatggaggagaaggctatgacaagttcgagatcgtgtactcgaccggcaacaacgacatcgacaacttcgtaatcctcgaaggtagcgaaacaatcgtccccgatggattggagcgagatcctgaaaacggatacaacaaatacagcttcgaactgccggacaatgccaaatatgtcgcaatccactgtatatcttcgggtaaaatcggtttgctcatcgacgatatagagtttattgcagccaatatgcccgatgaaacgcttgtcctcaatggatataacctgtatcgcaatggcgaactgtacaaacaactcccggcgaccgaaggctataccgacacggaaatagaaaaaggaaacatttatacctacaatgtcacggccgtattcgacaaaggagaatcgccatattccaacacggttacggtagataggtctcagtcgggtatcgatgaggcatctggaaacccgataaaagtatatgccgccgaccacacgatcgtcattgaaaatgtcgataaccggcaagccgaaatattcaaaatagacggtagcaaaatcttcgacgagattatttcttacaaagaccggattcacgtcgaaaccggcatatatatcgttcgcatcgatggaaaatcgttcaaagtcacagtccgataaatcgttcgactgattgattatccttattcataaaggctaaaccctaaaaagggtttagcctttatactatcggcggacaagcacacgtcaagttttattacccttcattcacaccttttttgcctgttccgaaagtccgaataaaaaaagtacttatatttgtagaacataaaaacagaggcgaagcgacacgacatcataaatttatatgtcgtctgcacaatctgtttcgacaaatacactaacaacacctatatggacagtacagcgctttcgagatcagacagcatagttctcattcccacttacaatgagaaagaaaacattgccgcaattatccatgccgtattcgaacttccccgtcagttccatatactcatcatcgacgacaactcccccgacggaacaggagcgattgtcaaagatttacaaaaacaatttccgggcgctctccacctcatggaacgaaccgggaaacaagggctgggaacagcctatattgcaggattcaagtgggctatcgaacaccgatacgaatacattttcgagatggatgccgatttctcccataaccccaaagacctgatgaatctgttggccgcttgcaaaaccggtggtgcggatatggctatcggttcccgctacgtcacgggagtgaacgtagttaattggcctatgggaagagtcatgatgtcctatttcgcatcaaagtatgtgcgtttcgtcaccggtatgaaaatacacgacacgaccgcaggattcgtttgttaccgacgtcgggtactcgaaacgatcggactcgattcaatccgattcaaaggatatgcctttcaaatcgaaatgaaattcacgacctacaaatacggattcaccattaaagaagtacccattatattcattaaccgagtattgggtgaaagtaaaatgaacaccagcatattcggtgaagctgtattcggagtcatcagattaaaaataaacagttggttccgcaaataccccaagaagagaaattaaccgccgacgccccaaaagacaaccggtcatgtgcagaacaatcattacaaacggaacgatcgtaaacgatggagagcacttcatcgggagcatcatcgtcaaaggagagtttatcgaatccgtcataaagggaaaactgcctgaaaatatcgtatacgacacagaccgtatcatcgacgcctcgggcaaatggattctccccggagttatcgacgaccaagtacatttcagagagccgggactcactcataaagccgagatcgccaccgaatcggttgcagcggtcgcaggaggaatcacctcctttatggaaatgcccaataccgttccccaaacgacgaccctcgaagcccttgaatggaaatactctcgtgcagccgaagtttccccggcgaactattctttttatatcggcgctaccaacgataatttcgaggtactgaaacaggttgacttctcacaggtttgtggtgtaaaaattttcatgggatcatctaccggaaacatgctggtagacagcgaaaaaacattacgacgaatcttcgccgaaattcctgcgctcatcgccgtacattgcgaacaagaatccatcatacaagctaacaaaaagtattataccgaacgcttcggagaggacttacccattttcttccaccctcttatccgcagtgccgaggcctgctatacatcttcggccaaagccgtggaattagcgacaagatacgatacccgattgcatgtcctacacctctccacggcacgggaaatgtctcttttcgacaatcataaaccactctcggagaaacatatcacgggcgaagtatgcgtgcaccatctctggttcgacgacaacgactacgcccaattcgggaaccgcataaaatggaatcctgccatcaaaacctgtgccgatcgtcgggctttgctcgatgcgcttcgatgcggcaaactcgatgtcgtggcgacagaccacgcccctcacctatggagtgaaaaacaaggttcctgtctgaaagcggcatccggtggtccgctgatacagcattccttgcaaaccatgttggaactttctctaaaaggagaattcacgatcgagcaagtcgttgaaaagatgtgtcacgctccggcgacgctctaccgcatcgaccgccggggatacctgcgctccgggcactacgccgatatcgttgtcgtcgacccttgcaaaccctacacagtaacaacagaaaatattctgtcgaaatgtaaatggtctcctttcgagggacacacattcccaatatcgatcgatcgtactttcgtcaacggaaacgaagtattctccgaaggaaaagtatgcaatcgaacccgaggaaaacgacttacatttcacgataattcaactcaaaacaaaaatatttagaaagcattacatctgttaatttttatataaaaccctttccccaatatttataaatgtcaatcatatgttttttttcgaatcgttttattacttttatagtcccaaaacgaaactattttataacgaaatgaaacacattagacttattttttcagcgatactcttatcgctcgtcgttccatgcggatacgcacaaacacgacaagactcattggctatcgcccatgcacaatggcataccgatacgttgaaacacggagcagtatgcatgtacacgaatatacacgtattcgattcaccccaacaaatttctatcataaaatacgatcctaaaaagtataaaactcaaatcgtacaagctccgcaaatgacgatgaccagccatttggcaaaggaaaatcaggccgaagccgcaatcaacggcagctacttcaatgtaaaaacaggagcccccacgacattcatacggctcgacggtatcgttcgtggagaaaccacccgtgccgaagcctttcgcacagacggggctatctccacagataaaaacaaaataaaaattcataccttcgactccattacaagtaaaaaattgggcaaaaaatacaaaaacattttggccgcaggacctctattgttgaaaaacggagtacgccaaatggctccgaccttcccagaaaacacaggcaaagccaccaaaggaaacgcccacagttccgacgttccacaaggtttcttcaaacgccaccctcgtgcttttatcggcattaccccagacaaccaaatcatgatggtagtggtggacggccgttttaaaaaacactcggtaggtatgtctatcgatgaactatcttatttggcaaaacaattaggcatgcgcgacgcactgaatctcgatggtggagggtcttccaccttgtggaacaataaaacgggaatcgtcaatcacccgtacgataacaaaaaattcgaccacgaaggagaaagagaagtaagcaacgccatacttgttattcctaataaataaagatttaccatgaaaacactgttgaaaaccataggaatcgtaagtacactgattggcagctcatttttatttcaaaactgttccgaaaaagagagtattccggaaggtattatcccccctaccgactcggtaagctcaaagatagaaattaaaaatttctcgatcgaagcccaaattcatacctcaccggacagtacggttaccatgcaaggcgaaggatttctgcaatccgatacagtcgctttgatatccgagaccgctgccaacaatacctatgcgttacctcttgcctcggttacgaaacagagtgccgacattgtcatgccgaaaaatatcgtctccgatacataccagttatggctcaaacgggaaacagattcctgccgattgggaaaaacgacattgattatcgagaatgccgtagacttaaacattcccgatattgccggcatgactctcaaaggtgtagtatattgcgaaaataaacccttacccaatgtcgtcgtatccgacggatataacgtagtacagaccgacgagcaaggacgatattatatacaatccgataaaaaaagtggatttgtatttatctctgttccgggaaattacgaagttgcgattaaagacaacaaccaacccgtttttttctatcgtttggcaaaagacgattccgtagaacaacacgacttcgaactcaccgcaaccgacaacaccaatcatgttttattagccttagccgatatgcacttggccaaccgcaacaatgacctatctcagtttaaactgagatttctaccagacttaaataccacggtagaaaaatataggtcagaaggcaaaaaagtatacggcctcacgttgggcgatatgacttgggatcaatattggtattccaatcgttatgatttaagcaagtacctgatcactatcaaatcggtcgatctgcccattttcaactgtacaggaaatcacgataacaacccttactgtgcagacgactggcaagccgagcaggcttataaagatatcatagggccgacttactattctttcaatttggggaatgtacactacattgtattggacaacattcaatacatcaatacaggagccagtcaaggaacgatcggcaaacgtaactacaacaagaaactcacggaagaccagctcagttggttaaaaaaggacttagcgaccgttaccgacaaaaatgcgccactattcgtagccatgcacgcacaactatatgccaaccccacatctttaccacaaaaaaatactatttccatgagcggaggatcgacactggtcaattacctcaaagaatttaccaacgctcatgtcatcactgggcatacccacatcaattacaccatcgaaccctccgatcaacttatcgaacataatattgcagcggtatgcgcgacatggtggtggaccggtaaaaacggatatgcaaacaaccatatttgcaaagacggttcacccggtgggtacaaaatattctcaataaacgacaacgatgtaaaatggctctacaaaggaatcaaagaggaagaatcgaaacagttccgcagctacgacctgaaccaatgtcatattacggccgaagcctttgctcctgagtccacagaagcggaaatgggagcttacagcgatacttacgggacaaaaaataataagaacgagatattggtcaatgtttggggatatgacccggaatggaaagtcgagatgaccgaaaacggcaaacctttggaggtgaaacgagtcgttgccaaagaccccttacatattatttcttacgaagccaaaaggctaaacgtaggggctaccccgacagccgatttcgtttcctgtgcgaccgcccatatgttcaaggccacagcatcgaacgcaacctctaccatagaaataaaagtaacagaccgatttggaaatacatacagtgaaacaatgaatcggcccaaatcactcagttgctctatgaaataaaaaaaagaaaaacaataacattaacacacaaaagcctatgaaacaatttgcaaaaaagtctttggttcttttcatcgccctattctttacggccgcattatccgcaaaaacacccaaatacatcttctattgtatcggtgacggcatgagttttgcccatgtaatggcaacccaacttttctacgaaaacgggaactatgaagatggaaacgaatcgctggttttcctcgatttccctgtccgttccgccatcagaacctatgccaacaatagtctcatcacttgctccgctgccgcaggcacagcattggctaccggtcataaaaccaatttagctcatatcggaatcggtcctgacaaacaaccgttaacctctgttgccaaacaactgagagacaaaggatatgcaatcggaattatcaccagcgggcaactcgacgatgctacccctgcggccttttatgccgggcaaatgcgaaacgacacctaccaaataggtaaaaaaggcgcagatagccaattcgattttttagccgggagtacattaatgaaaccatttaacaggagagacccaagccaaccttatatatacgactactatcgccaaaaaggctacacggtatgccgaggtccggaaggctataactcccaaaaaaatgcagacaaaatactcctagtagataccgataccacactcaaaaaatggttaccctacgtgatagaaagggagcccggtaaattaggtttggagtttatggttcaagccggtatagaaaaactatataaaaagaaaaataaaaaaggatttttcatgatgatcgaaggcgcaagtatcgatcacgcttctcacccacgtgatatagctacggcaattaaggaaactatcgaattcgatcgaagtgtacgcttggcatacgaattctataagaaacaccccgatgaaactctcatcatcgtaaccgccgaccacgaaaccggagggctcaccattggagaaacgactacacaccctttcaactgggagtatgtaaactatcaaaaaatgtccaaagaatccctctccaaattatttcaaaaaatgagagagacaggagaaatagatacttgggaaaaaacaaaaaaaatattggccgagaacaccggattatgggataaaattcctgtaaacgcaggggaggaggcccagttaatgcaatgctactacgagacgattgttaaaaaaagcagtaaacaggaaattacactatatgcaaaaagcgaaccgctcgttgccgatgccattgctctattgaataaaaaaataggagtaggctggaccagcttttcacacacgggtggattcgttccattctacgccattggctgccaagcccgacaattcggagctttgaacgataacatcgaaatacccaatacgattcggaaaatcatgaaaataaaataagcggtaagttttaaaaaacctgagaaactgaccgtaaaaaacggctataacaccggggttcttcaaaagttctctatcggctatttgaaccatcgaaaccatagaacttgaaatacataccaaacttcccgaggcgcaggtcataaaaacacctgtcgccgacggcgggaagactcatgcaagcatagataattttatcaataaacaataatctgtaatttaagaacatgaaaacagaatttcaaaaatgtatggacggagaaatctttgatgggaaagacaaagaattggcagagatgacattaaaaaccaaacgtctgcttgtaaaattaaattctacggattatgccgacacgaaacaaaaagaagccatcttacgggaaatgttcgggcatttgggagaaaatgtccatgtagacatcgactttcgctgcgaatacggaaaaaatatattcgtaggcaataaagtcattatcaacatgaactgtacattcgtagataataatcgtatcgaaataggcaataatgttttgattgcctccaacgtacaaatatacacagccacacactcgacaaatgtaaaagaaagaaccatgcaaaattgggacgaaagtaaagccatttgcaatacattcgcacttcccataaaaatcgaagataatgtatggataggaggtggagccattatcttgccgggagttacgatcgggcgtaacagtgtcataggcgccggcagcgtagtcacccgttccattcctgccgactgtgtggcggtgggaaatccttgtcgggtaatcaagcacatgaacaacgagccggactaaaaataaaaagagctatctctcgcccgagagtagctccaattctttccttgtttaagttgcaaattattcagcaacagcagcagagtcaactgcaacagagtcagcagcaacagtatcaactacttctactgcaacttcttctacaacagcaacgctatcagtagcttcggtagattcagcggctttattgccacaagaagcgaaagacattgcaaatgcaacagcgaagaacaaaactaactttttcatttccttcaaattaaagataaaacaatatttttttgcttcaaaaacgccacaaaggtatatattctttttatatgttgtactcttaatcttacttttttttcagaatctttcattttttctgtaaaaaatgattcaaaaaaagttcaattatcatataaatatcgttttatactccttttaggtgttttctcgaattcattcggataaagttgaatgcgagtaatctgctcgtatggagccaacatcttatttaaattatttctgacctcctccatagccatcggtaaatctctattagagacaccgtaactatccatcgcttcatagtcgggacataccaaagcgactaatttcccgtcccgctcgacaattaggctttccatcacaaaaggcatattattcagtttagcctctatttcctcgggataaatattttgcccgttcgaagtgagaatcattgtcttagagcgaccctttataaaaatagtaccatcggcgcttatggttcccatatcaccggtatgcaaccacccgtcctcatcgagaaccgctttcgtcgcctcctcgtttttataataacctttcatcacatgttcgccccgtacacatatttcaccgggaatattttccgggtcaagagaatctattttggtctctacatacccgaacaatgtccgccccgacgatcccggtctaaactcccgatggggtgtataactgatcaacggagcgcattcggtcattccatatcccaccgtaaagggaaattttattttatgcaagaaagtctctacctccctatttatcggggctccacccacaatcacctcctcgaatcggcctccgaaagcatcgatcaatttcttcctcacctgtccgtaaatccgactgtccaatataggaatatttaacgcccaccgcataggcgttttattgagcaacggctgtatctgttttttataaattttttctaaaatcagaggaacacaaataatcaaattaggtcttatctcttccaacgctttcagcaaaattttaggggaaggaatcttacccaacaacgtgatatgtgtacccacggccaaaggaaccaacaaatcgaaggcacacccgtaagcatgtgccaacggtaagaacgaaatacatttactccccttataatgcaagtgagaacgaacaccgaacatgacatttcccgccaaattgttcccggttagcatcactcccttactaaatccggttgtccccgatgtataattaatcaaaataactttgtcgttatccaaatcggcatacttgatgtcctctctattgaaaccgttcggataagtagctttgaatttccgcttcatctcccgcaaacacttggcaatctcctcgccatcgcgttgcacaaggcaagaaaaatcttgtaaagaaatagcagccctcacttcgggtaacttctccatttcgatattttcccaaatatgatcgccgacaaacagcaacaccgaatcggaatgattgataatatgatgtatatcatgagggttgaactcttgaaggatcggaaccaaaatagcaccatacgaaacggtggccataaaggcgatacaccagttagacgtattttttcccactaatgcgatcttatcgcctcttctgatttgacaatggcgaaaaaggatatgcaattttgcgatttctcgcgccatgtcttcatacgtgagcgtacgttgttcattataatcggtcaaagctggcaaatcccagttttcacgaaaacttgactcatatagctttataaaattttcgggaatcatattcaagatttaaatagtttggtaacaaagatagtacaaacggaaacagaaacaaatgatattcggttgtaccaaatcctgtttatttgtgcatttgccgacaaatatacaacatagtttgcaaaatagttccctcataaacaactattagaaatctatgggaaggtattttcaaacgaaatgagtacctttgttttttattttgcatcacgaccggctgaatatgatagacgtccatacattcgaaaataaaacagcggcctactatacattgggctgtaaacttaattttgccgagacctccacacttggaaaaattctcgaagaaaacggcattcgcaaaatacgaccgggagagaaagcagacatttgcgtggtcaatacttgttcggtaaccgaactggccgataaaaaatgtcgtcagacaatccgtaagatagcccggcaacaccccggagcgtttatcgtcgtcaccggctgctacgcacaactcaaacccgaagaaatatcccatattcccgatgtcgatttgatcttaggagctgaacaaaaactcgatatcctgcaatacttgggagacttgcagaaaaaacaaaaaggaaatatcgtcacgacccctaccaaagacatcaaaaaattctctccctcttgttcccgaggtgaccgcacccgatattttttaaaagttcaagacggttgcgactacttctgtacctattgtacgattccgttcgcacggggcagaagccgaagcggaaccatcgaacaacttaccgaacaagctcgggaagtagccctgtccggaggaaaagaaattgtcattaccggagtcaacataggagacttcggcaaacaaaccggagaaacctttctcgacctcatcgagtcgctcgatcaaatagaaggaatcgaacactaccgtatatcctcgatagaacccaatctactgaccgacgacatcatttcgttcgtcgcccggtcgaaacgattcgcccctcatttccatatacctctgcaatcgggtagcgacaccgttttgaaattgatgcaccgtcactacgacaccgatttatttgcccgtaaaatcgaaaccatacgggaaaagatacccgatgcattcatcggtgtcgatctcattaccggtgtacggggcgaaaccgaagaactgttcgaggaaagccgtcgtttcgtcgcaagcctcgacatttcacaactacacgtgtttacttactccgaaagacccggaacgcaagcgttgaaaatcaatccggtcgttcccgtccccgaaagacacgagcgttgccgtcgcatgctcgaaatctccgagaagaaattgcacgacttctattataaatttcaagggacaatacgtcccgtattgttcgagcaaccgcgcaaaggggctcctatgcatggattcacagacaactacatacgggtagaaatgccctatcgtaaagagtgggtaaatacttgtcgccctgttaaattaggagaatttaacgagtcgggagatgctctgctcgcaatcgaaatataaattcgtgatatgaaaaaagagactcttcaaaatatcgtctattctccgctttacctgtggttcaaactgcatgctattttgcccatgcggatactatatattctatccgatattttatatttccctctatattacatcgttcattacaggagaaaattagtatccgaaaatctgcgcaaagcgtttcccgataagaccgacaaggaactgaaacaactggaacagaaattttatcaccacttctgcgactatatcgtcgaaactataaagctaatgcatatctccgacgaggaaatgcgtcgccgcatgaaattcgaacaggtagaaatcatagaccgtctctttgaagaaaaccgctctatcattatcctgttagggcatttcggtaattgggaatgggttccgtccgtaacgctgtggactcgcacacccgatgtcatgttcgcacaaatatatcgccccttgaaaaacaagtggttcgatcgttttttcctgaaacttcgttcccgattcggttccgtatgtattgccaaacaagatacgttaagagccatcttacaaatgaaacgttcgggcaaaccgtccattacaggcttcatgtccgatcaaaccccctcaccgacaaatatacaccattgggctcgattcctttcgcaagactctcccgtattgaccggcttcgaaaaaatcgcccgtaaaacggatttcgccgttctttacttcgatgtcgaaatcgttaagcgcggatactacaaaacgactatacgagaaatagccctgcgccccaacgaactgcccgaattcgaaatcaccgatcgctacacggccatcatggaaaaaacgattctcaggaatccgtgggcatggttgtggactcacaaacgttggaaatacaaacacgaggattttcccggtacatgatatgaaaaaaatcgccgtcattatactcaactggaatggagaggatttactgcgtaaatttcttccttcggtatgtgcccacaccaatgccaatatagccgatgtcatagtcgttgacaatggttccgacgataactcggtcgaagttctcaaacaggaatttccacaagttaaaacgctgctattccctcaaaattacggattcgccgcaggctacaacaaggcgttggagatgctggattacaaatacgccgtattgcttaactccgatgtcgaaaccactccacactggctcgaacctctgttggaatttgcggagggcaacctcgatgtagcggcttgtcaacccaaaatcaagtcattaaggaagcgtgaagaattcgaatacgcaggtgcggccggcggatttatcgatcgttacggttacccgttctgccggggaagaattttcaataccctcgaaaccgaccgaggacaatacgacgatatatgcgacatcttctgggccagtggtgcggctcttttcgtccgctctgaaatctataaaaaagtcggaggattagatccttcattcttcgcgcacatggaagagattgatctttgctggcgcatccatctcgcaggataccgcatcgctgtcgtaccgcaaagcacggtctatcacttgggaggagcatcactcgatgccgccaatccccggaaaacctatctcaactttcgcaacaaccttttaatgttgcacaagaacctgccctgcaaagaagggaaaaagacactgtttgtccgcaggctttatgacacgctggcttttgtgcggttcgcccttttaggacagttttcccatgcccgtgccatactacgcgcccacaatgactttcggcaaatgcgcaaacgatacaccgaatttccgaataccgatttgttaaaaacattccccgaatccgggcgcaacataacaatagactattttctcaaagggaaaaaacgattccgataaaaaccggttctaccgaaacatctgaacgacacgcttcacagccgcaacaaatgcttccgcttcggctttcgtattatatgcggcgaacgaggctcgcactgtaccctcgataccgagagaggtcatcaacggttgtgcacaatgatgccccgtgcgaacggcaacacccaatttatcgagcaacatacccatatcgtaatggtgtatcccgtccaccaaaaacgagataaccgaacttttatgttccgaagtaccgaatatgcgcaaaccttctatgtcttgcaatcgatcggtcgtataacgcaacaattcgttttcatgagcggcaatagattccaatcctatatgatcgacataatccaaagccgtcgcaaaagcgctcgtccccacatagtccggtgtaccggcctcgaacttgaaaggcaactccccgaaagtcgtacccgaaaaatcgacatgagcgatcatctccccgcctccttgataaggaggcatggcatcgagccacttttctttaccgtataacacacctatccccgtaggtccatatactttatgagccgagaacacatagaaatcggcatcgagctcctgtacattcacccgcaaatgaggtacggcttgtgcgccgtccaccaagacaggaaccccctgcgcatgagcgtaagcgatcatttcacgcaccggattaatcgtccccaatacattcgagacatgggcgacaccgaccaaacgagtatgctcattgaaaagagacttatatgtatcgacgttcaaatctccacgttcgtcgatgggaactacccggagtttgatattgcgccggcgctgcaaaagttgccacggcacgatattggcatggtgttccataacggtgagaataacctcgtcgccgtcgtgcaggaactcatctccaaaagaagaagccaccaaattgattgcctccgttgttcctcttgtaaaaataatttccgaagacgaaccggccccgatgaactgttgcacccgacagcgggcagcttcgtgggcatcggtagcctcttggctaagcgtatggactccacgatgcacgtttgcatttacccgatagtaagtatcggcaatatgatcgaccacacacttgggagtctgagacgtagcgccgttatccaaatagattaacggtcttcccgaaatctcccgactcagaataggaaaatcttcccttattttttcgacatcaaacataacggcactcctttctcataaatcttaatgacacgcttgacaaccggagcatttcgccaactccccacggaaccttttctcaaccaattggcgtagccgatctttcaaggcatcgagccgtaccaactcgatgacatcgttggtaaacgcaaacatcaacaacatgcgagcttcgggctcaggaataccgcgcgaccgcatataaaacaaggcattttggtcgagctgaccgaccgtggctccatgactacacttcacgtcgtctgcataaatttcgagttgaggtttcgtgtacatcttagcgagtggggatgcacacaaattcttattactctgataggcttcggttttctgcgccccgtgtcggaccaatatacgcccgctgaacgaacctcgcgccgaatcgttcaacacgtatttgaacaactcgttactgtggcaatgaggcacggcatgatctatatgcgtatacgtatcgacgacctgtcctttatcggcgatagccataccgcatagagacaattcggcatgctctccttcaaaagccgaatagtaattattacgggttactccgttatgcaatacaataccattgaccaatacgttagatcgttccccttgacgcacgaacaccgacgaaactttcgacgtattctccgaagactcctctatatcgtagtagtcgaacactgcgtcgtcgtccacgaatatctcgcaaacttgcgacgacaggaatttaacggcagcctcgtccgagtgatcgcacaccagcaatttggcctgcgcccgttttcctacgacaatcaacaaccggcgattcaccataaaatcgacattgccccgaaggatatttaccaactgtatcggtttttccacgacgactccgtccggaatatacaaaaagaagccgtcttgggcaaaagccgtgttcaaggcaacggttccgtctcgtttcatatcggcgacctttccgtaataacgcgataccaaatcggggtattgcaaggacatgtcacaaaggctacccaccaaaacgccgtcagggagtttagatgataccggctgaacccgtttgtaaaaagagtcattgacaacgaaatagagcaacgtactcaaattaggcacatcgcaacgaaacacttcataaggattggtctctatatctatccgacccagattcaacccgtaatcgggagaatagaccgactctatatctgtccgccggtgttcctcgtctttcaaagagggtaatccccgactctccaacaaagacacagcctcttcgcgcaacccgttcatcacggccgacgaatggccatttatcaaatctttttgagacctatataaatctatatattgttgtactgcacccatatcgacttaaatttcgcccaactctttttttatccagtcatacccgcgctcttccaattcaagagccaattcgggaccgcccgatttcacgattctccccttatagagcacatggacaaaatcgggggcgatatagtccaacaaacgttgatagtgtgtgatgacaatcgtcgcgttcttctcggacttcaatttattcacaccgccggcaacaatacgcagggcatcgatgtccagcccgctgtcggtctcatcgagaatggaaagacggggttcgagcatagccatctggaatatctcgttccgtttcttttctccacccgaaaagccctcgtttaccgagcgaccggccagtttattatccagctccacaatctcccgcttttccctcataagtttcaagaaatcggtagccgacagtggttcgaggcctctgtacttgcgttgctcgttcacagccgtgcgcatgaaattaaccatactcacacccggtatctccaccggatattgaaaactcaaaaatataccttcgtgagaacgatcctcgggtgacaaagccaaaaggtctttcccataaaactcgaccgagccacgagtcacctcataagccggattaccggtcaatacggcggaaagcgtacttttccccgaaccgttaggccccataatcgcatgcacctcgcccggtttcacttcgaggtttatccctttcaatatctctttgccatttatgctggcatgtaaatcttcaatcttcaacatagatatttcgttttattcttttctttatttattccctgccgttactgcgactacttgtcccgccacgacatatacaccacaaggtaaatagtcggtattcaagccctcaactacattcattatcttcactatttgtcccgtcactttgtaaacagacaactgcatcgaccgatcgctttgtacgaacaaacgtccgtttgcagcgtacactcgacccaccgaatgatctgccggcgaatccactccatcgacaatacggtcgatatgcaccggatagccgtcgttttccccgggaaaatattcccaattccggcatacggcatcgcctttcaccgcattgttcaaggcatccaaaaaaccgctcccggcagactgcatctctgctgtgctatacgcaataccgttctcgccgacttctgtaccctccacaacagcatcgctgttataatagcaagaatgcacattcgattcactcaaccggcacaccttgacactagcgacatcgctgtatacatcacccgtcgaataactattccacaataacttataagcctttcccaccaagcctccgacgcttccctgtgaagaaccttccacatctatatgtgcgtcgattaaagagatatttcctcgattatagctattgtacaccggttcttcacaatatccgaccagtccacctgcataaatagcattccaacgggacgaagagcggggagccgaactttcgattttcaaacctccacgattccagcaatctacaaccgggcaatctgtattctgacccatcactcccccgaccgataacatcgaaccattcgatttaacctcgatctcaccttcgtttccacaggtgtacaacgaatcggtttgcgaactattataaaaggaataagagcaaacgcctcctacctgtacttcaaaaccatcgctttcacaaatcacggagtccctattgaaactgtacgttatacccatgctcgccgaggaaaccccgccgacataagcactcccttcacgggcattcaccttaacgaccgaatggttctcgcaactgtctatacgaaatgtataattgctcgaaagtcctcccacaaatatatcacctttggcattcgaaaccgagatgttcccttcgttgacactcgaaataagactaccgcctttctcataaacactccgactacgtccgaccaagcctgacacccatacatcggtaagatcgctatgctcacctatatccactattatttccccatcgttggaacaatggtctatcgtcgctccatcggcatgggcgaccaatccgctcacagaacataccatctcatgagaatcggtcttttgaagccacggagtaaatacgacatcggctcgattgacacaatgagaaaaacgcacatcgccaatcgccgatgcagctatcgtccctatctggaactccaaatctccgaaaaagaaatcgtactctttggcacatgctatccgacaagtttcgtccaactccaagtttcttatctcggaagttccacgaaccgatccaaacaaaccggacaaaacatagaaataatcgtcggaataaccgcccccacccatatgcggcactatcgtcaatccgctgatcttatgaccgtcaccatcgaatacacctctaaaataatttttaatggaaggagtttcccatatatgagccgacatatccatatcggccgccaatcgaacggtcttgttcggataattccacagcgaccttgtcatatattcaccaaaagcagcgaactcctcgggcgtggaaataatcatcacatcgttatcgaaattcttgtcaagccattcttcatcgtaattcccttcatcgaaccacgagccctcttgcgccgaaacaggaaaaacctccacagccaaaacactcaataacacaatgagaaaaaaacgatacgcaatccttttcatatcattctactattttccttaacctaccgaaccttccaacgagatctgcaatagcttttgcgcttcaacggcaaactccataggcagtttattcatcacctctttggcatatccgttcacgataagacccacggcatcctcggtagggattccacgctggttacaatagaatatttggtcttcattgattttcgaagtagtcgcttcatgctctaccacggccgaatcattcagaatctccatatacgggaaagtatgtgccccgcaatcggaactcaacaacaaactgtcacactgggtaaagttccttgcattctcggcactcggcaacactttcacgagtcctcgatagctattctggctacgacccgccgaaatacccttcgatacgatcgtactgcgggtgtttttcccgatatgtatcatcttcgttcctgtgtcggcttgttgataattattggtaacagccaccgaataaaactccccgaccgaatgatcgcccgccagcacacaactgggatatttccaagtaatggccgaccccgtctccacctgcgtccaagagagcttagagtgatcgcctttgcacatgcctcgcttcgtcacgaaattatagataccgcctttcccgtccttatcgcccggataccaattctgcacggtcgaatatttcacttcggcacgatcatgcactacaatttccacgatagctgcgtgcaattgattctcatcacgcataggagccgtacaaccttcgagatagctcacatagctgtcgtcatcggcaacaatcaatgttcgttcgaactgtcccgtattagcggcgttgatacggaaataggtagataattccataggacaccggactcctttggggatataaacgaacgagccgtcactgaatacggccgagttaagcgctgcaaaaaaattgtcccgatacgaaacaaccgagcctaaataacgtttcaccaaatcgggataatctttcaccgcctcgctgaacgagcagaaaatgacacccaattcggccagtttttcccggaaagtcgtccgtaccgacacactatccatcaccgcatcgaccgctatacccgacagtttcatctgttcttcgagcgaaattcccagcttgtcgaatgtcttgcgtagctcaggatccacttcatcgaggcttttcggagcctctttggtcttgggagcggcataataactgatagcctgatagtctatatcgggaatattcaaatgcgcccaatgcggcatttcgagcgtcttccagtaagcgtatgctttcagacggaattcaagtaaccattccggctcctttttcttcttcgaaatatggcggataatatcctcgttcaatccggtaggaataatatctgtctctatatcggttacaaatccgtatttataatcgttagtagtaacgtcgtttaatatttcattcgaattatcctgtttcatttttaatctgctttacaattttcacaacagagatacggctcgttgcatatcgaataaggtataaacaatcccctcgtcggtttggtttccgaaacgaactgctcttgtgccatcgaaaagagcaacggagctacacgcaatgtatatccatagaactgtgacgaagccgtctctttttccggaatcagtttacccttaggatcgataatatggacgagattaagcactatactcaatatgaccaaatatttgacggcgccgaacaaagccccggccaatctatcgagccaccccaatgccacatgatgcgtaatgtgatgtatcagcctcatcagttgaacgcatataatgtaaacgataaggaacaataacgaatatgcgataacccggcttacaccctcaggcaaatcgaacatctccctcaacaacgcagagaacgaacctccgaaaaatcgggcgacgactatacctgcgataaacccgcccaacgaacctacctgacggataacccctttgataagtccgtacagaaaacctataacggcgatcaataggatagtaaaatcaacataattcatctctcacactcccgattcttaaccctgcaaaattacttttttattttgaatactccgtatttccgccttattatccgtcaaaggcgataacaaaggccgccccgtatctacgaggcagcctctctattcccgaaaaacgtttctttcttaaagcgtctttttcacttctacctcttcataggcctctacgagatcgcctatcttaacatcgttgtaattcgtgatgttcaatccgcattcaaatcccgtagtcacctctttaacatcgtctttgaagcgtttcagagaacccaaatctccgctataaatcacgataccgtctcgtatcaaacgtatcttgctcgaccgtttcagcttaccttccttcacgatacagccggcaaccgtaccgactttcgtgatatgataagtttccaaaacctcggccgtgcccaatatttcctctttgatttcgggagacaacataccttccatagccgatttcacctcctcgatagcatcgtagatgatcgaatagagacgtatatcgactccttctttctcggccaatcggcgagcagccacggagggtctcacttggaatccgatgataatagcattggatgcggcggccaacgtaatatccgattcggatatttgtcctacggccttatgcaatacattgatttgtatttcgggggtggatagtttgataagcgaatcgctcaaagcctccaccgatccgtccacatcgcccttcacaaccaaattcaactcttggaaattaccgacagctatacgacgacctatatcgtcgagggtcaataacttgtgagtacgcaagcccaattcgcgttgcaattgttcgcgtttattggcaatctcacgtgcctcttgctctgtatccatcacatggaacacatcacctgcctgaggagcaccgttcaaaccgagaatctgaacgggagccgacggaccggcaacttcgatacgggcatttctttcgttgaacatagcttttacctttccgtgattggttcccgccaacacgacatcgcctttatgcaaagtcccgttttgcaccaatacggtagcaacatatccacgccctttatccaaagtggactcgataatcgaaccggtagccctccggttaggattcgcttttaagtcgagcaattcggcctccaataaaaccttttccatcagttcatgtactccggttccttttttagccgaaatctcctgcgactgatatttaccgccccaatcttctacgaggtagttcatattagccaactcctctttaattttgtcgggattggcattcggcttatcgatcttattgatagcgaacacaataggaacaccggctgccgaagcatgattgatggcctcgacagtttggggcattacattgtcgtcggcagcgacgataataatggcgatatcggtcatctgggctccgcgggcacgcatagccgtaaatgcctcgtgacccggagtatcgaggaaagtgatacgacgtccatcttccaatttcacattatatgcaccgatatgctgagtgatacctccggcttccccggcaatcacattcgaattgcgaatatagtcgagcaatgaagttttaccatgatccacgtgccccatcacggtcacgacaggaggacgagatgtcaaatcttcttccctatcctcttcttcatgaatagcctcgaccacctcggcacttacatattcggtcttaaaaccgaattcttccgcaacgatattgatcgtctcggcatcaagacgctgattgatcgacaccatcatgccgatactcatacaggtagcgataacctcgttcacctgaacattcatcatcgaagccaaatcgtttgccgtaacaaactccgtcagcttcaacactttactttcagcttcctccatttcggcgagctcacgttcgcgattcgagaaagcctcgcgtttttctttacgccatttagccgatttcttctgtccttttgtattattggtaaggcgagccaatgtctcttttatctgcttttgtacatcttcttcgctcacctcggcctttataggacgttgtttttgtttattcggtctatttcctccgttatttttaccatttcctccacgggagggttgtccacccatcgatgaaatgcttttcgatatatctaccttttctttactgattcgttgacgcttcctacgttcaccaccttgctgattagcatcgtcaccgccggcagccttgtgtgattcttgtctctgtttctctttactctcccgttctttacgtttttcctctttcgtctttttcttcggacgagtctgttgattcaacgcatcgagatctattttaccgacgacattgatattcgaggtaaacgccggacgattaatggtaaacacctcgtcttcatgggattcctcaactcccttttcttctttaacctcttgctcgacagtctcctcttttactttcggttcaactatttgaggttctggttgcgattgagagccaacctcttgtttaggttcggcgaccggcttattctcttcttcggcaggcttcacttcttcacgggccgacaccgccggctctggtttttcctctttcgttttcacttcgaccttgttctcctccgatttaaccggctcttttttctctaccggactttcctttttatgttcggacgacttcggacgattcaacgcgtcgagatctatttgaccgaccactttcgggcgttgtgtctcgggaataattgttttcagctccttcggttcttcctttattgccgatgaagaattcccctcctccgattcggtagccgatgtcgccttgctcttttccttatgacgttcaagactaatgctctccgattcgagtttcaaatttttgtccttactgaactccttgacaagcagtgcatactgttcgtcggttatcttggtgttagggttagcttcaaccgtaaaacctttcttttgaagaaattcgaccgccgtctgaattcctacattcaagtctcttgctactttatttaaccttatcgacatactcagttttagtttataaataatggaagaattaaagatgcctccgacaaaggcacaaagaccgcattgtatcggtcccgaaaacggattactcttcaaactccgctttcaaaatagcgagaacttcgtccacggtgttctcttcgaggtcggctttctcgatcaatgtttcacgaggcaacgcaagcacactcttcgcagtagcgcatccgatacctttcaaggcctcgatcacccagtcgtcgatttcgtcgctgaattcgtcgagataaatatcctcctcttcttcctcgtctatatctctgtaaacatcgatattgtaacccgtaagcatgcaagccagcttaatattcaagccacctttaccgatagccaacgagacctcttcgggtttaagaaacacctctgctttcttctcctcttcattcaaccggatcgaagaaatcttggccggactcaaagcgcgttgtataaacagagatggattggccgtgtaattaatgacatcgatattttcattgcgcaattcccggacaataccatgtatacgcgaacctttcacacccacgcaagctcctaccggatcaatacgatcgtcatacgattcaacggcaattttagcacgctctcccggaatacgggcaatcgcccttatcaaaatcaaaccgtcgtgaatttcgggcacttcgagctcgaaaagacgacgaagaaattcattggacgtacgggataccaaaattttaggattgttgttcttgttatcgacttccaacacgacagcccgcacggtctcacccttccggtaaaaatccgaaggtatctgttcggctttcggcaacagcaactcattaccgtcgtcatcgatcaacaacatctcctttttccaaatctggtaaacttcggcacttaccaactcgcctattttatctttatatctattgtaaatggcatctttttgcaaatcgagaatcttcgaagccagcgtttggcgcaagttcaagatagctcgacgaccgaatttctcgaaatgcacctcgtcggtcatctcctcgccgacctcgaaatcggggtcggttttccgagcctccgacaaagaaacctgcaaattactgtcggtcaccgctccgtcttccacaatctcacggttacgccatatttcgaaatcccccttcgtcggattcacgattatatcgaagttttcatcggtcccgaacatctttgccaatacgttgcggaaagattcttccagcacactaatcatcgtagttatttcgatgttcttcaactctttgaactctgcaaaggtatcgaccatgctaacgggttcctctttttttgccatattatttaaatctgattagatattttgtatattttacttcatcatatccaaaagcaaggtcttcctcgacctccacttttcgtttactggtttcgctctttactttcttggttatcgtcacgacaaatttctccgaatcggcacttttcaatatccccgaaagtttcatgccgtttttggtcaacaattccacttccttgcctatatttttcttgtactgcccgaggactttgaacggagaggtaatccctgccgacccaacctccaattcataatcttcgacatctcggtcgagcttcgattccaaaaaacgatgtaacgccacgcagcgatctatatccacaccctcttcgttatctatttccacgacaatcacattatcgggttttacttgtacatcgactacgaaacagtcgcttccggtcaacccttcttcaacaaatgcctctatttcttttttatctatcataacgactctatgcaaagaaaaaaacgaggggacatcattgccccctcttccattccaaccgccacaaagatagcacaatattatataatacgcaactccacagattccctacgaaccaaaataggataattcgcacctaaaatttaaatatttttcaacaaatatattcttatttaatataataaaaatgcgaaagaacgcaattgtttccgcaacaaaagttctctgcccccacaataacgattacacaaagcatgaaataatggactgtgatccatatattttagatgagcgagctcatggcaaataacataatcgatcaactcttcgggtaggtacatcaaataaaacgacaactgtatctctccccgacgggtacaatgccccaactttcgccgcccgcgacctatcgttaccgaaaccactggcaaccccaatctcgacgagatttgattcagcctccgaggtaaaacctcttgcgctcttctgtaaacgaaacgacccactccccgcgacaacgttttccgtacattcgtctcattcaaatcgattcccggaggacaaaacacctgtaaacaatcaccctcataccgaaataaaaacttattcgacacacccggcaataaacatatatctcctccatagcaaggaatactatcgcccgtagacaaaactcgatttttccgtatcgtcacgcttcgagacaccaacaccctcagtttttcacggttatcgtccactgccgatttcacccggtttacagcatatccttccgggcaagtaatctgcaaaccattatcctttactctaaatatcaaacggcacgcccgactatccgaacgaatataaatctccccgaattcctcgtctcgataaacaaacatctactttctccttttccatttgcgaagataatggaattggagcacttgaacaaaatcggacaaaaatggctcgatcgataattagtcgggatatcggcttaaaaaaaaatcggaggcgattctcctttaacttctctcttgtattcacagacagatatgaaaaagaatatttgaagcagcattataagtcctcttcccttctgcgtcccgcagccttacgaggtgttttgcaacgacaaaaatcgaagcagggaagaaagcgaaattcataccaatctctcccactgtgttacgcagagatatagcgggagtgctcgaaaagcggaagagctaaatcaagaaaaacacaaaaaggtgttaacgacagaatactattatcctcctgccctgcgcacgcatatgcgataggggagaagtgtaaaatctatccttataccaaaaaagagaatattcctttaaccaccccacctataccctgtggcattgcaaagcactcactcctccactgtgttttgtaacgcaaaatataggggaggtggcacgaagtgacagaggggttaaataaatatccacaacagaggaaacgcatcaaggtatcaacactctccctctgctcatcgtagatgagatagggggagtgcccccagagcgagggggttaaactctcaaaaacataatttattatcttctcaatccttctctgaaaagatcgaaatgtaattatcgctaaaattcatgtctatcccatgaattttccattgaatccaaaaacgctctcccccacgaaaagaattgtcggtaaaatctatttaccaccggttccccaaaaatagtttcgctccacaacaaaaccgaaataacaccccattagttaaaaaatcatatttatttagtactatgctatacaaactaccaaattatacctatatttgtgttgtaaaaggtactaaacatgaatacagacaacgttaaatctcagatgagaaaagggatactggaatattgtaccctgttgatccttcaaaaaagaagagcctatgtttctgatattatccaatcgctcaaagaggcgaaactcattgtagtggagggaacgctatacccacttctttcccgccttaaaaactccggattacttacttacgtttgggaagaatccacgcaaggccccccgaggaagtattatgaacttactcccgaaggaactgtttttctaaacgaactcgacagcgcttggaaagaattgaatcaagtcatcgaccacatcaaagaacaataaactaaatacacttttatatgaaaaagaccgtaaccgtcaatctcgacaaaacgattttcaatatcgacgacgatgcctataccgtcctcgaatcttatttagaagcactacacgaccatttcaaaaaagaagaaggcgggcaagaaatcatgaacgacatcgaaagccgcatttccgaacttttcaaggaaaggttagggttcggcatgcaagtaatcaccctacaagaggtcaacgaagtcatcgccataatgggccaaccggacgaaatagaaaacccactcgattcggggacggctcccgacaataatgcagatggtgataactctgggcaaacgaccgatacttcgaacaacgaatctcataaatcgaccaaacggctgtaccgcgaccccgacaatcgcatattaggaggtgtagcatccggtatgggctactatttcggtatagacacggtagccattcgcgtcatcatggtattgctgttacccttatgggcttcatcggtatggatatatctgttactttggatatgtattcccgaagcccgcacgacctctcaaaaactcgaaatgcgaggtgaaacacccactgtcgacaatatcaaaagagccgtagaagaagaaaaagaaaatgtctcccgaaacggaggtgtcgccaattcgatttggcgaagcatagggagtatattccgtggacttttcaaattcatatttatttgtatcggcgggcttatcgccatatccattatcggagccttagttacctgcatcatcagtattctaggtttctttttcttaggaacagcaaccataacgacccctttcttctcgatttttcccggagggatgcacgttcttaacggacattgggaactggttgtattcacactctcgctattttttactttcggtatccctctgtatgccatacttcgagccgtattaggatctatattccactggaaagcccaatcgtcggcactcaacattttcctactggttctttggatactttctctggtcgggctattcgtctccaccttcatttacattcccgaatatccattattaaacctataaagctccataattagaaagagaacgccacaaaactgccgggaaaccccagtttgtggcgttcttgctttatagaaaaatcgggtcactcccgtttatcgaccccccacatcaatttcgcgcgaagcgttgccgaaaaactatgccccaatcgtttcactacttttatggaaaacggagcctttcgcaacacaacttgcgaatctgtatccaacataaccgaacgaccgtcgagactcaacaaataactatggttgcggctatccacacgcaacgtaatattcatatcgtcattcacgaccaacggtcgaaccgtcaaactgtgcggcgccacaggcgaaataacccaattggcagcccgaggcataataatagggcctcctacactcatcgaataagcggtcgagccggtaggtgtcgccacgattaaaccatcggcctgataggtattcaaataactatctcccacagtcgtatgaatggaaatcatcgatgaagtatcctgcttcaagacagcgacctcattaagagcataaggccaaaaattctccgacaaaccgttaaactcgacttgaagcaacgatcgctcctctattttatactttccctctaaaatttcgttcaataccggttctacttcttcggcagggacatcggctaaaaagcccagacgaccgatattcacacccaaaacaggaatacccctgtcgcctattttttcggcagcccgcagaaaagtaccgtccccgccgatactcaatgccatatcggcagtataatcgcttcgacaatcgatctccccaattctatgacaaacatcgggaaattctttcgataaaaaatcataaaaatccccgtgcgctacaagctccgcctcggtacgggacaatgtctgcaacacatgccgaatctgttccgaccgagatggttgataagtatgcccgaataataagatcctcatatatttctacttcacatttcaagataatacatcaattcttttatcctttgttctatccgctcgtccatgactccatgcaactggtaacaactcactacccgataatcgaaccgctccaacgaacgaagcacaggggtggcatcttctctgtctattcgcaaacaagccttccatatacctgttttctcatcgggacgaatcatcaaattcatcactcgacaatcgttatcctccaccaatcgagtcaactcggtagccgaataatcttctcgcggaatctccaattcaataatcgctcccgaagaagaggtttggcacaaatgagcgaccgcaaccaaagccgaatgaatggatatcgcgcccacataacggcgatcggtcgttaccaccggaagtatatcgtcggagtattgagcaagttgattgacgacatcgaacaaatggctctcttcccgaacagacggagtacgccagttttcacgcccgatctttccggctacatcgtcccgaagcagctctttctcatgaacgactccgacatacgagccctcgtccacaatcggcaaactcgacaatccagacatctgcatcgtcgccaacccttgtttgaccgacattcccggggttaaaagaggtatttcgggcaatatcatatcttttgctttcattttttgctcatatttctgtaattcgtattatttttgcggtaaagattatacaaaaataatgaaaggtgtgtgcaggataaaacaaatccgtttgctttttacgccggactgcaccttcttttcgcattttatgcaaatatagtgaaaggtgagtgcagagacaagagggaattatatttccgatttgactatgccgaaccgaatcctgtattcgtgtttacaaatatagtgaaaggtgagtgcaaaggcaaacggaaatcatatttccgacttggctttgccgaaacgagtcctacactatacaaatataggtattttttcggtggacaaacccgtcggattgtttgagttaaaattattaccgacaataccgaaggtttcaacaccaaagcgagataaggttaataaagagaaatgacaaaattaagtgtaaatgtcaacaaaatagccaccttgcgaaacgcaagaggcggtaatattccaaacgtgttaaaagtcactttggactgtgaatcattcggagcagaaggtatcacggttcacccccgtcccgacgaacgccacatacgttatgccgatgtgtatgaattgagaccggctgtaagcaccgaattcaacatcgaaggttatccctccgaaaaatttctcgatatggttctcaaagtgaaacccacgcaagtgacactcgttcccgatgcacacgatgtcattacatcgaacgcaggttgggacaccaaaaacaacttcgattttctttccaaagtggtcgacctttgtaaatcagcgaatatacgaacctccattttcgtagaaccggatttagagatagtcgaatacgccgcaaaaaccggggccgaccgtatcgaattatataccgagccctatgccgttcgctatccacaagacaaagaagatgcgataaaaccattcgtcgaagcagccgaacatgcacggggcttaggattgggcgtaaacgccgggcacgatttaagccttgaaaacctccggttcctgcatgaaagaatccctttcctaagcgaagtatccatcgggcattgcctcatctgcgatgctctgtatttaggtctgcgggaaaccatcaaacaatataaagaatgcctgaaataatccattaaaccgaacgccatgaatttattgacattgcttttgcagactaccgacacgcttgtgactccccctgttctgacacccacggtcgaaaccgcaggtgatttgaatctttgggaactcgcctgcaagggaggaatcatcatgattccccttttattgctctccttgttatccatctacattttcttcgaaaggctgcaagtcatcagacgagccgcacgcgaagacaatacgtttatggaacggatcaaagactatatccacgaaggcgatatagatagtgcattgaaactctgcaaaaaaaccaatacgccctattcccgacttatcgccaaaggtatttctcgcttgggtcgtcccatgaacgatgttttagtagccatcgaaaacgtgggaaacatcgaaatcgccaaactcgaaaaaggatttccgtggttagcaacaaccgccgcgggagcacccatgttgggattcctcgggaccgtcactggtatggtgagggctttctacaacatggcatcggccggaaacaatgccgatatctccacgctgtcgggaggtatctatgaagcactggtaacgaccgtagccggtctcatcgtcggaattatcgcactctttgcctataactatctcgtatcacgtgtagacggggtgatgaatcagttggaagcgaagactatggaatttatggatttgctcaacgagccagcagaataattcggacatcatggcactcaaacgaagacataaaatagacgcgacgtttagtatggcatcgatgaccgatgtcatattcctgttgctcatattcttcatgatcacctctacgatcgtctttcccaactccataaaggtaaaccttccgcaaagcaatcagcaagcggcggccaaaccgctcacacgggtaacgatcgatgaaaatttgaactattacatcgctttcggaaacgaagcggcacaacctgtcacatacgaccaactggtacagaaattggcagaaaccccgcaacacgacaccgagcgattcgtcgctctttatgccgacgaaacagtcccctatcgcgaaatcgtcaaaatactcaatatagccaacgacaaccgattaaaaatggtactggccgccaagcccgtacacaacccataacccttttccgttttccgtggaacaacagaaaaaagataaaatactggcacttgtcacgacaatcgtcttgcacatagtcgtcctgtttgtcctgtggctcactttcttaggaaaggaacccatcggcacaggtagcggcgtattggtacaagtaggttttgtagatgaatcggcaggtatgtttgaatcgaatgccgatcgtcccgaacaaaccgaggcggaacgtccccgtgaaaacgaagatgagctactgactcaaaccgacgaggaaagcatacacatcgaaaagaaagaagataaaaaagataaaaccatacaagagaataaaaaagacgagcgcatagccaatcaagtcaaaaatgctttcgggaaaggagtttccaatgacggcagcagaggcgatagcgacgaaggaagcggcacgcagggcaatccgttcggtaactcttcgaccggcgaaataaccggtgtgggaggatatggaggatacaacctcggcggacgcggactcgtaggttcattaccatatcccgaatacgacaacagtaacgatgccggtatcatcgccatatccataaccgtggatccgcaaggaaaagtcatcagtgctatcgctacggttaacggcagcaaaggcacggcattctccaacccgaagttgcgggcatccgccgaagccgccgcccgcaaatcgcgattcgagcgcagcacgggttcctccaatcaaacaggagttatcatctatatcttcaaacaaaattaagcacttctttactacggaattaaagtcgaaaggagaaacctctcgactcctttcctcttgtccctcgcaccttcggcttgtcccgtagcattacgagacagccactcactcctcccctgccgtgtcccgtagccttacggggtgttttgcatcgcaaaatataggggaggtgtccgaaggacagaagggttaaataaatatccacaacagaagaaatgtatcaaggtatcaacactctccctctgctcatcacagatgagatagggggagtgcccgcaggacgagggggttaaactctcaaaaacataatttattatcttctcaatccttctccgaagagcctgaattgtagctatcgtcaagcaattcatcgctaaaattcatgtctaccccacagttttcctactaaactaaaagaacagtgcaataaacgtagaaatagcgagagaataatttacgccgtctaataccccaacgctatattatcgatccaaaaagtattgcccaatcctcctatataggccgttccacaagtagccgaagccattaccaacatgtgcgttaccggttcgtcggcttctccccaacccacttcgaccaccggaaccatatcgcctttgctgtttcggcaataatacgatttatcttcgggaataagccccatataagatttgtaaaaaggcttatcggtaatatccccgtagtgaataggcacactatgaccgttaacccaatcgggtgtactctttatatatcgttctctcccagtgcccacacgacgagcatacacatttccgtcctcatcttcccaccggtgctgcaacaaaatatatacttccgcgctatctcttccggccaactgtttccgagaactgaatccggtcgattccgtacggaaatcatcgggcgaagccttatatttataatcgaaaatcaatcgcacgggacgtttggtgaacggtatacccatttccattttgccatagggattactcgtcgaacgaatcggctcgttcacctctcctaaaaaaatacttccgctcaccaacacgtgaagattcatcatacccaacacacgacaatcctctatgacggtttccatacaagcacatgtcccgccatcttgacgtttctccggtcgtacggtattactggttttcactatccccattacattcgccatcacattcgacgacgcccagggagaaccgcccatgttccgatacgctttattccctttgatatactgtgtcggagcgatggcgtatacagtcttcgtttttcctcccaacaaagcagattccttgatttcacgagttacccaatgttcaaaatcgccgaaagctatcggttccacatgttgagccctcagactcaccggctccaaaagaccgagcaaaataataaacaaacttagttttcgcatctttttcatcttaattttcacaaagtcagacgttacaaaattaaatcctccttcgatttattgtggacaattatctatttttaaatattcacaggtcctcattttgtataaaacctttctattccgctttttgttcgaaacaaaaaatgtttctttatgtaaaaatacagagggtttcagaaaagtatttaaatcggaaacgatctctttaattttcattatttttgcaatatgtatgaaaatagaagcggtttaacacgagaaaaaacatattcgtcttactcggcccctatcccatcatgcgttatttttgtaaaaacattactattcatttatcttatatcgaaaaaacacaatggacacggctacattcaatacattcctcgtcgtcatggccgttacggcacttatcgttttcatcgcgctacattttatcaacgcgggctacggtatgcttttcgataaaaaatggggagcatcactttccaatcgcataggctggatcgtcatggaagctccggtatttatcgccatgattttcttatggattttcgccaccgacgaataccggttcgacccgattcgaatcacattcctcgtcttgtttcaaattcattatttccaacgctctttcatattcccctttctcattaaagggaatagccgcatgccactcagtatcgtgagtatgggtatcatcttcaacctgctcaacgcactcatgcaaggaggttggatcttttatatctcacccctagactactacactgccgaatggttctattctccgcaattcatcatcggagttattatcttctttgcgggaatgtttatcaacattcaatccgactccattatacgccacctgcgcaagcccggtgaccgacggcattacataccgcagggaggaatgttccgatgggtatcgtcggcaaactattttggagaatggctcgaatgggtaggattcgctatcctcacttggtcatgggccggagtcgtattcgcttggtggacattcgccaacctcgccccacggtcggcggctctttacaagcgatacagcgaagagttcggagaagaatttacaaaagaaaaacgaaaaaaaataatacccttcatctattgacaacatggataacgaatattcccaaaaacaggccatactgttcactccggcttcgataggcccgataaccctgagaaaccgcacaatccgctcagcggcgttcgaaggcatgtgcgaccataacgcacccaccgaaatgctctatgactaccatcgcagcgtagcggcagggggtatcggtatgaccacattggcctatgcttcggtaacccgaaacgggctctcgttcaaacatcaattatggatgcgacccgaaatcgtcaaaccgctgcgacgcattacagatgccattcacgacgagggagccaaagcctccattcaacttggacattgcggcaatatgtcgcaccgcagcacagccggccagattcccatatcggcatcgaccggattcaacctctattcccccacatttgtgagaggaatgcgtaaagacgaaatcgaggaagtcgcaaaagcctttggcactgccgtcaatacagcacgtgatgccggattcgacgcagtagaaatccatgccggacacggttatctcatcagccaattcctgtccccgtacaccaaccggcgacgtgacgaatacggaggctcgctcgacaaccgcatgcgatttatgcgcatgtgcatggaaaatgtgatgaaagcggccggaaacgatatggcggtaatcgtaaaaaccaacatgagagacgggtttaagggaggtatcgaaatcgacgaaggcatactcatcgcacaagaactcgaacgcttgggagcccatgccttagtattgagcggagggttcgtcagcaaagcccccatgtatgtcatgcgaggcgaaatgcccattacctccatgacttattacatgaaaacatggtggctaaaatacggtgtcaaactggccggacgattcatgatacccaaatccccgttccgagaggcctattttctggacgatgcgctcgaatttagaaaagcattgaaacttcccctcatttatgtgggtggtttggtagctcgtccgacgatcgaaaaggtgctcgaccacggattcgaattcgtacaaatgggacgtgcgctcatcaacgaacccgattttgtcaaccgcatgaaaaacgaaggcgaagaacgttgcgggtgcgatcatacgaactattgtatcgcccgcatgtattccatcgaaatggcctgccacaaacatttggaaggacagcttcccccttgtatcgcacgggaaatagagaaaatgcaccatgccacgaaataaagatctttcggcatacacggctctcgtcaccggagcgagttcgggaatcgggctcgaatatgctcgacagctagctgcgcggggagctaatttggtgatggtgagtatcgaccgggaagacctcgatcgggaagcaaaaaagattgtcgacaccagtggcgtatcggtcgaaaccatttgcatggatttagcccaacccgatgcggcaaacaaactttacgaccactgccgacaaaaaggaatacaaatagagattctcatcaacaatgcaggcatattctcttttcaggaaataacacgcaccgatccgaagaagatagaaacgatgctccaactgcacatcggtacaatcactcgcctgtcccgcctctttgccgcagacatgtgcaacaggaaacacggatacatactcaacatgtcctctttatcctgttggacgccctatcccggcatagcgctctacacagcgaccaaagcctatatcagagtgttcactcgggctttgggctacgaattacgcgactacggagtcgtagccacagtcgtttgtcccggaggcgttgccaccggattatacggattaaaacccgggctactgaaattgggagttcggttaggagtccttatgacaaccgagcgcttggttcgcaaagcattaaaagccctgttccgaggcaaaaaacaacttatccccggagtattcaaccgtctgctgattcctttggcatctgtcatgcccacctccatacggctatttgtcaaacaccgtctgctcgatgaataaagattattacatagttaccggagcaaacggtagcataggacaagccattaccgaagctctcgctgcccaaaacctcccggtcgtcatgggctgccggaacatagccaaatcacaacctatcagacaacgaatcatggagaaaaccggtaattccgatattctcctcctgccgctcgaccttgcctcattccaatccatatcccatttttgtaaacaactggtagaaacgggtatctccataaaagcactcgttaataatgcaggagtcatgtgcaaggacttcggtaaaaccgtcgacggattcgaaacctcgataggcgtcaactacataggaaccgtttttctcactgagtcgctaataccgctcatgcacccggggagccgcattgtcatgactacttcgttaacccgatatatcgggaaaatagattcctcttttttctccgactcaccccgaacctacaaacgattcaaggcatacggaaaatcgaaactcgcccttaccatatacactgcacacttgtccatgaaaattcgagataaaggaatatcggtaaatgcggccgaccccggtatcgtcgattccgacatgatcaccatgcattcttgggtcgatccgttagccaatcttttttttcgaccctttatcagctcaccccgaaaaggagcgatcggagcgatctatgcagcgagtgcgccggatacggataacattacaggcgaaattttcacaaaacaccgccatacccctatcccagctaaatggagaaagtctcggcaagccctatggttgcaaaacgaaaccgaaaaaataatagccggtattaggtcgtaaaacgcccttgcttccgactgaaaatataaaattatacaagacttgtattttcttattaactcgtcgcaaccgcctattagacatagtcacgaatggtaacataggcataataatatgacaattatccagatacggaaagtcccatctatcgacatacctctatttaatcatatttttataaacgaacccccttttttcagcacgcagaataagaattataattttgtttttaattccgaaaacactacctttgccaagtattcagatttacattttctcttgtttcaagggaaaaagaaacaagagatatctttgatattacgaacaagttctgccggaaaaaacaacgatgtgaatcgttatactatcagtcccctttttttatgatatcgagattccggcagaactttccttttttatatccttagaccaaacaaataaatattgacctctttgcacacggtgcaagagaagtcatcaacaaacacaatcttgctcttatcgagttttaccggaaagcaataaagcacaataacaattcaaccttctcccctgtgtttccgtagggaaatataggggagagaccgaaggaacggtagttcctgaggagaggggttaaatgatatataaaaacactgctccttctgatttcctaccgaacctatttaaattaatctcatttttatctcctaaaaacaaaaaccgccgagctcgttcagaactcggcggcattatgtatgtaatcaaatccttcaattacaatttaccggcactgcccaatacattttcaattttgtgtttgtacaatttttccatgttgtcacgagccgggcccaaatatttacgaggatcgaattctgcgggtttcgtcgcaaacacctcgcggatagcggctgtcatagccaaacggctgtccgagtcaatgttgattttacaaacggccgatttagcggctttacgcaattcctcttcgggaataccgatagcggcatccaattttcctccgtatttgttgatcgtatcgacctcttcttggggtacagaagacgagccgtgcaatacgatggggaagcccggaagtttttccataacggcatccaatacgtcgaatgccaaaggaggaggaaccaaacgacccgtcttaggatctacatgacattgttcgggtttgaatttataagctccgtgagaagtaccgatagagatagccaaagaatcgcaacctgtgcgagtagcgaaatcgattacttcttcggggtcggtataagtgtgatgttctgcacttacctcgtcttctacaccggcaagtacacccagctcaccttctaccgttacatcgaattggtgagcatagtccactactttcttagtcagagctacattctcttcgtaaggcaagtgagaaccgtcgatcattaccgaagaaaatcccatatcgatacaagatttgcacaattcgaacgaatcgccgtgatcgaggtgcagaacgatttgaggatgttcgcaacccaactctttggcatattccactgcaccctgagccatataacgaagcaatgtttggttggcatagttacgagcgcctttcgaaacttggagaattaccggcgatttagtttcaacagaagccttgataatagcctgtaactgttccatattgttaaagttgaaagcgggaattgcataaccgcctttgatagccttagcaaacatctctttggtgtttaccaatcctaattctttgtagcttaccatcttataataaattaatgttagtaattcctcatgtgaaaagattgcgaacaaaatcaataggacttttcttatcagctagtccggcttgttttcgacaatcgttgcaaagataaacatttttgccgactccctttatcaacaagtataaaaaacatgcataccgcatacttttttactaattttacataacggaaaatgtggcattccactctctttatatcgatataacctgcaaaatgttcaataaatatactcagaaaaaggttaaatctttgtacaatcgcacattattgcattttgaaaccgtttctgctttctctattcaattattatctgtacttttgccctccgtatattttttataaccccttaaattcaattcgtttataaaaaatgagaaaatggcgtattgaggactccgccgaactatataacatcaatgggtggggcctgaaatatttttcgatcaacgacaaagggcacgtcgctgtaacgccccgggagggaagcgcatcggtcgatttgaaagaattaatggacgagttacaagtccgcgacgtcacatcgcccgtattgttgcgttttcccgatattctcgataatcgtatcgagaaaatatccaaatgttttcaacaagcggccgacgaatatggttacacggccaaaaacttcatcatctaccccatcaaggtcaaccaaatgcgacaggtggtggaagagatcgtcagtcacggtaaaaaattcaacatcggcttggaagcgggttccaaacccgaattgcatgctgtattggcaatcaacaccgatgaaaactcgctcatcatctgtaacggatacaaagatgagaactacgtagaattggcgcttttagctcaaaagatgggacggcgcatcttccttgtcgtggaaaaattgaacgaactacgtctcatagccgatatttccaaacgcttgaaaatacgtccgaacatcgggattcgcatcaaactggcaagttcaggcagcggcaaatgggaagaaagcggaggtgacggaagcaaattcgggctcaattccagcgaattgttagaagctctcgatttcttggaaaaagccaagatgaccgattgtctcaaactgatacacttccacatcggcagccaaatcacaaaaatacgccgcatcaaaaatgcactcaaagaagcctcgcaattttatgtccagctccaaaacatgggattccatgtagagtttgtcgatatcggcggaggcttgggtgtcgattacgacggaacccgctcctcatcgagcgagagcagtatgaactattctatacaggagtatgtcaacgactccgtctcggcgttggtcgatgcttgcgctaaaaacaatttgccgcaaccgaacatcatcaccgagtcgggacgatcgcttactgcccatcattccgtactagtattcgaagtactggaaactacctcgctcccgatatgggacgagaaagaggaactcggtgaaaatcctcacgaactggtagacgagctctataaaatatgggacaacatgaatcaaccccggttgctcgaatcgtggcatgatgccctgcaaatccgggaagaagctctcgacctgttcgggttggggctactcgacttacgtacccgtgcccaaatagagcaactattctggtctgtggctcgcgaagtgaacgaaatcgcctccgacatgaagcatgctcccgaagaacttcggaaaatctccaaacttctgcccgacaagtatttctgcaacttctctctgttccagtcgttaccagattcatggtcgatcgaccaacttttccccatcatgcctatcagtcggctcgacgagcgccccgaccgcacggcaaccatacaagacattacttgcgattccgacggaaaaatcaataatttcatctcatcgcacggagcgaactcgcaccttgccgtacatgcgctcaacaacaaggagccctattacataggcgtattcctcgtgggagcctatcaagagatattgggagatatgcacaaccttttcggtgacacgaatgccgtgcacgtcagcgtgtacaaagaccgctacgaaatagaccaagtcatcgatggcgagacggtggccgaagtcctcgactacgtgcagttctcacccaagaaactggttcgcagtgtggaaacatgggtaacctcgtctatgaaagccggcatcatcactcccgaagaaggtagagaatttctctccaactaccgatcgggtttgtacggatatacctatttagaaaacgactaacttttcacatggattatcgggacacgagcttcccggtaatccattcctatttaaaaatgcaacgctatttcatctacctttctttcaacggtgcgcagtatcatggttggcaaatacagcccaatggaatcactgtgcaagaagtccttgaaaaagcgttagccacattgctccgccgtgaaactccggtgacaggagcgggacgaaccgacgccggcgtcaacgcccgactcatggttgcccacttcgacgctccaatacccctcgacaatccgaccgaaacggccgacaaactcaatcgtattctgccgcccgacatagctgtctacgaaatacgtcccgtcattgccgaagcacacagtcgattcgatgctttgagtcgcacctacaaatactacataatagatcacaaatcaccatttatcgaatccttcgcctgccgttatcggggagatctcgacttcgacaaaatgaatacggcggccgaacagctctaccgatataccgatttcaccagttttagcaaactgcataccgatgttaaaaccaataattgccgagtgacattcgcccgctgggaacccgaaggcgaacgacatgtatttaccatcactgccgaccgtttcctccgtaacatggtgcgggccatcgtaggaacgctgctcgatgtaggacagggaaaactatcggtggaggacttcggccatatcatcgagcaaaaaaaccgttgcgccgctggaacttcggtccccggcaaagcgctctttcttcacgacatcgtttatcccgaccaccttttcctgcctcgttaatccttacacgacctgtgaaaatcaaacacatcacacaaaacaaggccgactttcttgacctgcttttattggccgacgaaagcgaaactatgatagcccgttatctcgaccgcggcgaaatgttcgccttgtatgatgacgatttgaaaagtatctgtattgtcacacaagaagggaaaaatcttcacgaaattaaaaatctggccacctatccgccattccaacgacaaggatatgcccgtcggctaatcgaatacatagaaaatcgctataacgcacccggcacgatactacaagtcggcacaggtgactcgcctctcacgatacccttttacgagcattgtgggttccgctactcccatcgtattcctcgtttctttaccgacaattatccgcaccctatcttcgaaggagggaaacagctcgtcgatatgatctatttgaaaaaagaactctgagaatttctttcgaaatttcccggacaacgactcttgcgcgaccacctatcgaaccgctttcttccgtttcgtgattacgaaatatagccccaacaagacaaacgggatactcaatatctgccccatatcgataggcaatacattctcgaaatccacctgccgctctttcaaaaattcgataaagaagcggaacaaaaatatcaaagtaatacacaacccgaagtaaaaacctcgcccgtaattatcctttttatatcgagcgaccccgaccataatcaagaaaaacagaaaataagcgatagcctcgtacaactgagccgggtgacgagggagcatatcctcacgctcgaatacaaaagcccacggcacatcggcgggcaaacctataatttcggaattcatcaagttggcaagccgtatgaaacccgccgccaatggtgcggcgatacccatcatatcgagaatatcgagataatgaatcttagtcttgcgacaaaatatagcaagggctataatcaaccccaacgttccaccatgacttgccaatcccgcatatcccgtaaacttccaatcgccatcgggataaaagtgcaccggcaaaacaatttccaacgggtgactcaggtaatagtcaggctcataaaacaaacaatgtcctaaccgtgccccgataaaaatacctaagaaactgtataaaaacaaattctgaaacgtatcgacaggtaaacccttcgattgatacaatttataaaccacctgactgcccgccaaaatggcgataaaccaaaaaatactgtaccaacgtatcgcaatgccggcaatcgaaaacaatatgggatcgggattccaatggatatatagcaactccataatttacaacgatgtatgttaaagaaatagtacaagccgagagtggaaacaaactcacttggttacaccgaggcacagtctattttcgtaaaatgcaaagataacgcaaggcacgaaaagggcaaaacggacttgtccattttttatttcgaatcactacctatctgcaatagacttttcaaaaaacaacacaaacaaagtcctaatctaccatcttctgcctctatatcaagcaatacaagtcctcagaacgagagagctaaaaataaaccggactgttcttcctttctataatataataaaagttgcaggtgagagtagaaaaatcaactttttattagttttgtaaaaaaacaaatatatgcccgtaacgatccctacacacaaggccacccaacaatcggactgcggaatattgctaaaaacaatttctcccggctctttccaagaacccgtccaatatgcccaccgagacgattactacatattcggcatagtagaaaacgggcattgctgtatcagtatcgactttaaaaattacacagtatcggaccatgaaatattatgtgttcaaccgggtcaagttcaccgggttgtcgacacaggaaatgcgcaagcaacgatacttttcatagatagtgtatttatcgacgcaccggataaacaaatcttatccgaatacgcattatctgtcgcaccgttccgaataaacgacctgcaattcaacgaattggaacaaattttctccattatctcccgaaatataaatataccggaaagcagccgtaccaaacgaatcgtacaagacttatcccgtgctgccacgggtataataatcgataacatacaaaacatcatctgccgtcaattgaaaagcagaagacaaatcgaaatcaccttagctctcaaaaaactactctccgaagattctcatatcaacagaagaccttcttattacgcacaactgctacatatctccccggtctatctgaatgaagtcgtcaaaaacataaccgggaccaccgcaagcaaatacattcaagacgaaatcatattgagagccaaacgtatgctaatctataccaccttgagcataaaagagatagctttcaatctagggttcgacgaccatacctatttcacccgtctattcactcaaacagccggtttatcccccactacatacagaaaaaaatacctcgaataatccaatcattaccccatatagtctatttcccagtttccctataagccgttactttgtactgtctccaaaagaacctatcgaacaagaaaaaacgatgaacaaaagacggcttatttacttgacagacgcaatattaattccccttttcgtcttatcattatactcaggtatacaactgcacatcgcaggccacggaaccgaacacgacatttggcacaactgggcggtatttcataccatcgacagtctgctctttactacattcgggatcatacacatcaaaagtcattggttttggtacaaaggcttgaaaaacaaaaagcgggaacgcaaaacacgaaggaaacaaaaaatcgtcctactgctcacattcatctttatatgggtcattattaccggtatatggttgttgtgttttgtcgaaggagcaaattcgccgtttgggaaattacactacaaggccggtctactaatgggtatcttagggctcctgcacatagtgaaacgattgcgtctcctaaaaaacggcttatgtctgaacacctctcaccctacgagtactccccctatctcaccgaaataagcaagggtgaattaaaataccaaatgaattcgttacacaaaggcaaagctcaggttaaatacattttattcctttttccaatcccccctcctactattttaggaagaacgaaatgaaacacatcaacgagagaaagaacttgaaaacactgtcggcttcacatacaataaagcaaataccacatgacgatggatagttcgaaacccgcctgttaccgcataatataaggtgaagagacccattcagtcagacacccgttccacttgcaccaaacatctatttgtaaaaattaaaacagtttctaactttgcaggcgatttacagatataactaaaagatacaaaagatgtggttatcactcgcttttctctcggctttcctattaggctgttacgaagtctgtaaaaagaaatcgctcgacaacaatgctgtcattcctgtactctttctcaatacctgtttttgcagtctgttgttcctcccgtgtattgtcctttcctacgggtttcccgaatttatgcgaaattcactcttctatgtgcccccttccaccggtcacgagcatatttatatcataggcaaagcggcgctcgtcctcacatcatggacttgtgcctatttcgccaccaaacatttgcccatcaccatagccgggccaatcaaggcttcccaacccattctcacactcgtaggagcattactcatcttcggcgagcaactgaatctctatcaatggatcggagtcattctggcgatcgtctcgttcattatgctatccttctccggaagaaaggaaggcatcaatttcaaacacaatatctggattctctttatagtcctcgccacaatcaccggtgcggccagcgggttgtacgacaaatatctcatgtcgcacggcttcgaccgaatgaccgtacaagtatggtactcctactatcaaatggcgatgatgaccgttattctctttgtattatggtatcccaaacgtaagcataccacaccttttgtttggaaaccctctatctttttcatctccctgtttctcgtttgtgccgacttcgtatatttctacgccctcagctaccccgactccatgatttctatcgtctctatggtacgtcgcagcagtgtcgtcgtcagcttcatagccggcgcattcctgttccgagaaaaaaatatccgtagcaaatcgttcgatttgatactcgtcctattgggtatgttcttcctttatctcggcacaaaataaaagacggtaacaatatttacggctgtttttttggctcacagaagcaaatatgattacttttgtgtcaaacgatcgttatgaaactaaagaatctgttattctgtttatgctcgatagtcaccttgacatcatcggcaatagaaccagtagcgcaattattcattgccatgcccgactcgctcgtcccttctatcgaagtgaaccgaaggaaggacctgatcgatttgatgcacgccggacagaaagccgagattgtcacgaaactcggcagtaaagccgagatgacactgctacaagacagcctgctctcgatcgacctgtcgaaacgcagtaaaatggaaatacggtggtatgatacaaccggcaacgatacgattatcgctcttgtcaatacggtatatgccccggcgggagacagtcgcatacggtttttcgacactgcatggaaggaactccccgcttcggaacgcattcgccagatacgacgggaagagtttttccaattccccgatagcttgacaaaggcaaaaaaagaagacttgttacgtccggtagacattttccttgtggagtacaacttcgctaccgacggttctctatgtgcccggcagtcatgggcaaactatctagacaaagaatcattcgatcgtatcgaaccctatctgcaagattcaatcgtgttgcattggaacggaaaaagattcaaataaaacaacctcactttcctgaacagaatcagattcaatcgcagcgataatcatcttatatcatcagagaccaaacgggctcagtcgataattagtagggattgaccttgtatattccaacccctctcctcagaaaccgttgtttcttcgatgtctcccctatacggctaacgccacacaggggagaagggtaaatacaatctccatctcattctccaaaataatgcggcagaggggaaactcttcccttaccgtttctcgcaaccctatggagtatatgtcgccaaacaaaatatagggagaggagacacatagtgacggaagaatcggaaaacagaaaggtattaacctcctgccctgcgcacacacgtacgataggggaggtggcacgtagtgacggaggagttcaaaaatacccgcagcaagagggaacggattagggcatccccctctccccctgccgtgtcccgtagctttacggggtgttcccataaagggatacaaggagagtacccgcagggcgaggggattaaactttcaaaaagcaatatattgtctttctcaattcttctccgaagatatccggaatgaggttgtcgacagagattcatctctaaaatccaagtctatcctcacaaattttctactaaatcacaaaacggggttacctttacaggtaaccccgtttaattatacaaaaaaacctctttaaaactctgcgtttttcggtgtacgagggaacggtatcacgtcgcggatattagtcatacccgtaacgaacaacagcaaccgttcgaatccgagcccgaaacccgagtggggagccgtaccgaaacggcgggtatcgagataccaccacatatccttcatcgggatatgcaactcttcgatacgggcaagtaacttatcataattttcctcacgctgcgaacctccgataatctcgccgatacgggggaacagcacgtccatcgcccgaaccgtcttgccatcgtcgttcattttcatataaaaagcctttatctctttcggataatcggtaaggataaccggtttcttgaaatgttcctctaccaagaaacgctcatgttcgctctgcaaatcggcgccccaatagactggatattcgaatttatgacccgactcctctaatatttttacaccctcggtgtacggcaaccgcacaaaatcgttatccacgacgaacttcaaccggtcgatcaattccttgtcgtacatttggcataaaaattcgaggtcgtcctgacagtgatcgagcgcataacgaatcaggtatttgaggaaatcctccgccaaatccatgttctctccgatttcattgaaagcgacttccggctctaccatccaaaactcggccaaatgtcgcggcgtattcgaattctcggcgcggaacgtagggccgaacgtataaatcgcgcccaaagacatcgcacccaattcaccttcgagctgtcccgatacagtgaggctggtaggtttgccgaagaaatcctcgctataatccaccgctccgtcctcggtcttaggtacttggttcaagtcaagagtcgttacttgaaacatagctcctgcgccttcgcagtcgctacccgtaattaacggagtattcaaatagaaaaatccccgatcgttgaaatatttgtgaatggcataagccatattgtgacggatacgcaacactgctccaaatgtgttcgtgcgaggacgcaaatgtgcgatttcccgtaaaaattccagcgtatgccctttcttctgcaacggatatacatcggggtcggcgccgccgtaaagctctatgctatcggcctgtatctcggcctgctgacctttaccttgcgactccaccaatgtaccgatgacactaatacaagcaccggtcgttatcggtttcatctccgcttccgaaaatttggagaggtccaccacgacctgtatatttttaatggtagaaccgtcgttcacggcaataaaattcacattcttattgccacggcgcgtacgcacccaaccctttacatttacttttgtcccgtaaagagatgcatcaaatgcatcgacgactttggttcttttcattgtttccatacttttctatataattgtacacttttttaagcatcgtcccgtacggagaaccgttcgggacgtgataaacatttcttattcgaatgaacccatctgcaacatgttcacctcttgctgagtgaggtaacgccaacgtccccgttgcaggttcttcttggtaagcccggcgaaataaacccggtcgagtttaaccacacgataccctaaggcttcgaaaatacgacgcacgatacgattccgccccgaatgaatctcgatacccacttggttcatatccgtctcgttggcataacttacggcatcgggctgtatagggccgtcttccaattctataccatcggcgattcgttgcatatcctcctcgctcacatctcggtcgagccacacatggtatatctttttcttgataaacttcgggtgcgtcagtttcgatgcaaggtcgccatcgttcgtcagcagtaacacaccggtcgtgttgcggtcaagacgtcccaccggataaatacgttcggtacaagcgttacgcacgatatccatcaccgtgagtcgtccttgtggatcgtccgatgtagtcacacaatccttaggtttattcaacaatacgtaaatcttacgttccaaagtcaccaccttgccacggaatgtcaccgtatcattacgggtaatcttcgttcccagttcggtcacggcaaccccgttgaccaacacttctccggcttgaataaattcgtcggcctcacgacgggaacagatccctgcattagccataaatttattcagacgaatcggttcattcggatccacctccggcaactcatattcgatgcgctgcgggcggctgaacaccttattattccgacgcggttgctggcgattctgattatatcctccgcgattattatacccccggttattatatccgcccgggcgattgttttgcttcggataacgaggtctctcactttccccgtaaggctgctggaagccctctcccacttcgttattacgattataatcctgattatacctcggagtattgttgtaattattgttccgacggttgtttccgtaattgccctgacggttattgctataccctccctgacgattaccatagttgtttggacgttcgttgccgtaagaacgatttcctccatctccatagttattgcggggatagtatggtctttccgcatttgcactgtacgaggagtgtccctcttctcctccatttcttctgtactctactttttcatatcgctcggtcgcaccttcgcggttcgacattccgatgcgcggacgcttagctcttttttcgctttccatagaaattgtttgtaattaaaaatacaagcctctcggcctattaaaaaacatctgttataaatgatagttattttttctcataaacaaaaattagtgcaaaccgaaagtaaaaacaaatttactatcgagccgcagcctatgtttgtaaacacgttgcaaagatacgaaggatttttcattttgcttctattacaatcgaataagttgttattttctgcttaaaaaaacaaaagctcgggccttttgttcgtccggcttgcaaagaatctgccttacaaccgttcaaagcaacaaatacatactcaatacgggaatcagtggggttatccttgcatatttaccccccctcctcagaaacgactgtttcttcggcctctcccctatcgctatacgacacagaggagaagggtaaaatctatccctgtgccgaaatgagaattaccattttaatcttttcttcctattgtatctatgtggcattgccggacatttcagcccttttttttagaacagtgagggattggagtgagattattaaaacctcttccctgccgtgtcccgtagtattatggggtgttttgcgacagcaaaatatagaggcggtgtccgaaggacagaggggttaaataaaattatccgcaacagaggaaacatatcaaagtatcaacaccctacctctgttcatcgcagatgagatagggggagtgcccgaaaggctaggggattaagccttcaaaaacataatacattatctttctcaatccttcatcgaagagatcgaactgttgctattgtcaagaatttcatcgctaaaattcatgtctattccttctgattttctactgaacccaatacagaaccggcatgcgataaacgtcgaaggagaataagaggttctcttattctccttcggttacaagtctcatttctatttttcatctaatcttgcgaggcttccccacctcatcaaaacccggtatatgagtgaggagttatctttcgtaattcctcttttaccgattccgaaacatcgagcgtatcgataaattcccgtatggagtcggcattaattaccgtattcgtccgtgtcaaagccttcaaagtctcgtacgggtgaggataaccctccctccgcaaaatcgtctggataccttcggctaccacattccacatctgatcgagatcgcgatatatagccggttcgttcagtaacagtttattcaagcccttgattgtactatggaaggcaatcagcgtgtgagccaaaggaacacccacattccgcaacacggtcgaatcggtcaagtcgcgttgcaagcgcgaaaccggcaacttcgaagacaagtggtccagtatggcattggctattccgagattcccctccgaattttcataatcgatggggttcaccttgtgaggcattgccgacgaacccacttctcccgctttgattttctgcttgaaatactccatagaaatgtattgccagaagtcccggtcgagatctatcacaatcgtgttgatacgacgcaaagcatcgaacagagcggcgagattgtcataattcgaaatttgagtggtccactcctcccggtctatccccaaccgctccttcaaaaatctattcccgaatgccggccaatcgatatcgggataagcaaaacgatgagcattgaaattaccggtagctcctccgaacttaccgctcaccggaaccgattcgagcaaagccatctgccgttccaaccgatagccaaatacccgtatctctttccccagacgggtgggcgatgccggctgcccgtgagttttggcaagcatgggaatatctttccattcctcggcataccggttgataatagccagcatatctttcaacactgggaaataacaatcgtgcaaagcctctttcaacaaaagaggaaccgacgtattattaatatcctgtgaagtcaacccgaaatggataaactctttataagcctccaaatgcaattcgtcgaatttctctttaataaaatactcgacagccttcacatcatgattagtaacagactctatcgacttcactttttcggcatcggcctccgtaaaatcggtatatatcttgcgcaacgccggaaacaaatcaggatttacccccgagagctgaggaagcggcaattcgcacaatgcaatgaaatactcgatttcgacccgtaccctataccggataagtgcccattccgaaaaataaagcgacaaatttttcaccttattgcgatagcggccatcgacaggagatatagccgtgagtgatgataattccatagtcttttatttgaaatagagtacaaaaatacgatttccccggcaatttttacacaataatttcattttttgttttgcagataaaaaaatagtattacctttgcaacgcttttcggcaaactatccgggcgtttagctcagctggtttagagcatctgccttacaagcagagggtcggcggttcgaatccgtcaacgcccacaaaatcccggataaaaccctgtggggcgaaagcccacgaaaacaggggcgtttagctcagctggtttagagcatctgccttacaagcagagggtcggcggttcgaatccgtcaacgcccacaaaatcttggacaaaaccttgttgagcgaaagctcacgaaaacaagggcgtttagctcagctggtttagagcatctgccttacaagcagagggtcggcggttcgaatccgtcaacgcccactatccccaaaaacaactatatatgtccgcacttgtaagaatcagtcttgcaggtgttttttgttttatggcaaagcctactctttaccatacataatacagaagatgcagcctaccatttgcatattaggcaaaaaaataggtcagtaaaaatttagtggggattgttcttgtatattctctcccatatatagctaacaccgttctccgtaatgctacgggacatggcaggggagaaagggatatgtccggtataaacagactgatatgatggcgttttcaacccctccgtccttacagacacctcccctatcgcacattcgtgcgcagaggaggagtacaacacatttcttagcttttgtagttttctacgcaacaagacaaaacattctaaccttctcccttgccgtgtcccgcagcattgcggggtgtttttgcccagcaaaatataggggaggtggccgcaagaacgaagggatttgaagtatcaatgagccctttcaaattcctaccaagccacaagcgcaaatcaaattaccgggtaacagtcctgccctcaaactccatcgccttcggacgcaatatccccctcgcgccccattcgtgtattttcaaaatcaaagagtctcttattataaaataatatagacaattatattttctttataaaatcgggataaaaaatttttatattattatatttgtaacaaagatatttaagcaataagccgagaatgaaaatcccaataaccaacatgatatgaaaataaaacttacttttatgattggcatgctgagtgcttgtaccttgctactccaagcccaatcgatcgatgaagaaacagcccgcgcagaggcttgtcgatttttcaacgaacggattacaaaaattccctccaaacgagacatttcccgacaaagcccacgactaaaattagccgaaaaaagaatgctgagtaacaacgaaacggcttattatatctttaaccgaggcgaaacagacggcttcgttgtcgtcggagcacaaaacgaaccgatagtcttgggttacgcagacgaaggtagcttcgaccctcacaatattccagatggattaagggaattattgaatagctacgccgatgaactggaatgggccgcaaatcaaacacagtcgatatcggcctctcccaaaggttctacccccgacaaaccggctatcgccccgctatgcgaggctatgtggaatcaagacgatccttacaatcgtctaactccgattataaacgggaaacatgctcccacggggtgtgtggctaccgccatgtctatcctcatgtatcaccaccgttggccggaacaaggatcgggctcctacggagatgtcgatttcagcaaagcccgatacaattgggaacaaatgacccctacatacggaacgggaagcgaagaaacagcctgcacggaagtggccgaactgatgtaccattgcggtgtggcggtaaaaatgaaatacggagccaccgaaagtgccgctttttcaacaaatatcgctcctgccctgaacgactatttcggatacaacggagtactttacgccgaaaaagaccaatatggcattaaaacatgggaagaccttatttataacgaattatcagaaaatagacctctatattatgccggaggtgtgcatgcgttcgtctgtgacggatacgacgggaacggctatttccatttcaatttcgggtggggtggtcatgccaacggctatttccgtctctatgccattcgtttgagcgatgtcggtatcggcggaggagcgggcgattacagttcgggacaatgtatcgtttacggtatagagcgccccgatgcgaaccgacacgttcccctctccattatcggatacgggagtttgtttttaacagattcccaaaatggaagttttggctataatgccgatgtgataaacgccggtgaggaaactataagcatcgagaccggcatcgaaatcaagccatcgaatggaggagactcccaattccacttcataaccacagaatcttttccggcccaatacaatgagcggtatttctttgatatccccctcgataatttaccggagctgccaatcggcgaatacaatctttaccctatttaccgaataacgggcaagaatcaaacaaaagtagttccgttcccttccaataaaatacaatacctgtcgctaacagtatccaatgagggcaaaaacttctcgcttccggcgatagaacccatatttacaagtcaaattacccccaagcacgagctgtatagcgggaaacgagccgacttcgatataaaactctccgtaacaggttatgagtattccggagatatacaacttcttctcacccgaaccgacaattcatactcttggagcaaacaaaggccggtagacttgactcccggagatacaatcgatttttcttggagcgaaatcctaataggcgccatggacagacccgttccggcaggagaatacaaattgcagttacgagtcaaataccagccaatatgcgaacaagacataaccgtgttgcccgcacccgaaacaagcgtattggaactcgtctcgcccattgcggtcaaaaatcaaggctgcgtgtctccggataaattcgaagcctctttcacggtacgttgtacctcgggctgctttatcggctgcatcaacgctttttgttacgacaaagcctccgggaacggtatagcccaaccttttgaaagcgatttcctcgtactgaaagaaggcgaggaacagacatacgtctacaattccttattgacagccgaacagggaactatcgccacagtcgatatcttcaccgatttggacaatgacggcatcggtgagattatcggcccgaccgagtacaactcggttccgttcatgatagcccctgagcactatctcgctattgacgatgttaccgttttccccgacacggcttttcagaaatatttacacaccatagactggttgaacgacggttatatgtccgactatgaatttaacgaaacaacttatatcaatgtaaacgaacgcaatataacaacactaaaaggactcgaattcttcaaaaacctcacaaggttggactgcttgaacaacaaactccaagcggtcgacctctcgggaaacacgcatctatccgaagtaaattgccagcacaacaatatagacaccctcatatttgaaaatcaccccgatctcgcatggctggcttgcggagacaaccgcatagaagaattgcgtatatccaactcacccaaattgacttacttatcttgtgaagacaaccgattgcgaaacttttctttcgggattctcccggctctccaagacctcatggccgacaataacccactcgacgacatcgaccagttcgattttacccgtcttccttccctcaaaatgtttcgactgtcgggcagtaacgctacgactttccgcccgacaaacgattccatcaggacactggttatcggcgggaacacaatgctcgaagagctgaacgtgtcgggctgcacagaattatccacatttcatttgcaaaattgtccgagacttgcgaacctatcgctcacaaacgaaaagttaacctccgtctctctttatgaaaattccggactttcatacctcgacgtgtcatcttgcacttcactttccgattttgagtgtagcggaagccccctctttatgctcgatttgtcaagtaatacggctctctcgtctgccactttcagaaacgggagagactgtaccgtgaccgtcaacgacaagaattgtttcgacctcacggattggatcggtcaaggctttcggatcgaccgcatgagcaatcttcaaaatgcctctgtcaaggacaactctctccatttcggggcctcttacgtccaatacgactacctcacaggtaacgacattctaccttcgattcccgtcaccctgcaaagcgaaggttgggcatcgggaatttccatgcctaagcagggaaacaaagtatatgccatagggcgggaaatcataattgaaggctaccagaacgaatcgatatcagtctacacaatgaccgggaaacacctattcgacaaacaagcccaatcgttcactgtccccaccgcaggaatctatatagtcaaagtaaacgaccgagctacactcgtatcggttccttaacgcagtaggcaaggataaaatcccaatatacacagccccgcacagatgacatctgtgcggggctgtgtataaatataggttcagtagaaaattcatggggatagacttgaatgttaatgaatgagaggaatctgcatttccccttctcccctgccgtgtcccgtagcattacggggagttacgttaaccatatagggaagataccgaaggaacaacagtttttgagaaaagaaattgaaagatagcatattatattttgaaggcttaaccccctcgccctgcgggcactccccctatctcatctacgacgagcagagggagagtgttgaaagtatccttttgaaccgcttttattcgctccgatgctttgtgggtattttcccttctctcctgccatgccccgtagcattacggggtgttttgtcctgcaaaacatagggaggtgtccgcaaggacggaagggttgaaaacaacatctcgttaagccgtttatatcagatatttacccccctctcctctccccctatattccttgccggaacacaggggggggggagggagatacatcactctgttcctgttatcgaatttttacaaaaaaagcgcctgcatttctgcaagcgcttctgtgaccccggagggactcgaaccctcgacccaatgattaagagtcatttgctctaccaactgagctacggagtcgacttcttagacggaacgggtgcaaaggtaactcttttcgagaaaccggcaaacgattattcaaaaaaatttctcgcaaccactatttttgacactccggcaaacgatccggctatccaagacagtcatcttctcccgaaaccgcactgttccaatccattctttccgactcttcaaacgtataaagctccgacgggtgattacgggtaagtgccaccaactccacatctttacccactcgtatgccttcctcgtaaagtcggttttccaccgtcttataagccagttcagggtgattgttatccccgctgagatgacatagaaaaatatttcgcaaagccggcgtatagattcgagccaaatattcggccgtacgggcattgtccatatggccgctatcggcaaggatacgtctctgcaaatgaagaggataagaaccgttacgcaacatcgcctcatcgtaattcgattcgatgaccagataattagcttgccgcaaatatttatctgccgtaggcgtgatatgccccaaatcggtcgcaaaagcaaaatacaaattcccgtaagaaataaaaaagcctacgttgtcgctcccgtcatggggtacttcgaaggctgtaatcgtaaaatccttgatcttgaacggaatctcttttacaataggccgatgagcgctgtaaattttatcgaccatacaataattacgattcattccgttcttgatggcctcggtggtataaatgggtatgccgtatttttcgcctaatgtccctgccgccttgatatggtcggcatggtcgtgggtaatgcacagagcaacgattttttcaaaagggataccatactctttcaaaaccttcttgatcgtccgcacacccttgccggcatcgatcagtatgccatactcctcgtttcccagataataacaattgccgctactgccgctggcaaggcttagaaattgtaagctcatatccttttttctcctcggggcacaaagatagctttttaacggcacaattgaaaattatcgaaggtaagatatttagaatccgtttaaatttcttcgatctccgacgaagcataaaggcaaaaaaaaacgattctgccaatagagattgtccttcatctccccagccgtgtcttgtagcattacagggtgttttgtggcaaataaaatataggataaagtgtcacgaagaaacaaaagggttgaaaaaacagaaaggtattaacctcctccctgccgtgtcccgtagccttacggggtgttttacaacgcaaaatatagaggaggtgtccacaagacggaggggttgaaaaaaataaccacagcagagagagagcggattagggcatccccctctccccctgtgtttccgcaaggaaatatagggggagtgcccacagggcgaaggggttaaactctataatcaaagggaaaaaatctacttataaagtaaaaaaatggcaggggttttctgataatcatacttcgtcttcgcccactcacccaacgagagcgtacgaatactttcatcggggcaagaaatacccgccgccacgcacaacctcgtatgaggacgacaggaacgcaccaaatcctctatcatcttatgattacgataaggcgtttcgataaatatctgcgtctgcccttcggcatatacccgttgttcgagctgcttgattctctttatccgttctcccgcctcgataggcagataaccctgaaaagcgaaactctgcccgttgaatcccgaagccatcagcgacatcaatatcgacgaaggtcccaccaatggaaccacaggcaaatgttcccgttgggcgatcgccacaacatcggcccccggatcggccacagccggacaaccggcctccgaaatcacgcctgtcgcatatccccgccgcaacggttcgagaaaacccgacacctccgtcgcctccgtgtgacggttcaattcataaaacgtcaagtcgtcgatacaaatatcgggatttgattttttgagaaaccgtcgggccgaacgcacattctctacgataaagtgacgtatcccggctattacttcgcggttataagaaggtagcacctgctcgaccggtgtatcgcccagaggaacaggaatcagatataatgcggttttgagcatacaaattcgatttatcggcaaaacccattttcaccgttcgacaaaaataggtatttttgcccaaagagaaaaacagaaactgttatgacagacctgcctgccccatttatcgaacgtacccgccgattactcggcgacgactatccccgctttgccgaggccctcgaatcggaatctccgacaagcatacggctcaacccttcgaaaagtactccgacaggcacgataggcgatccggttctctgggctcgacatgggttctatctctcttcccggccaacgtttaccttcgacccccggcttcacgccggagcctactacgtacaagaagcggcatcgatgttcctcaatcgggtaatacggcaatacgttcatgagccggtccgttatctcgacctttgtgccgcacccggtggaaaatcgaccgatgccgttgcgtcgctcccggtcggcagtttaatcgtcagcaacgaagtcatacccaaccgggcgcatatcctcgccgaaaacattgtcaaatggggatcgccctattgcatagtcacccgcaacgaagcctcggcattcggcgcactcgaagaatacttcgacatcattgccgccgatgtcccttgttcgggagaaggtatgttccgcaaagaccccgccgccatcaccgagtggtcagcggcgaatgtggcgcattgcgccgagcgacagcgcgccattctcaccgatgtgtggaacgctctacgccccggcggattgttcatttacagcacctgtacctacaacaccgaagaaaacgaggagatgatcggtttcctccgaaaaaagttcggggccatacctctcacagtcgatatcgacccggcttggaacataacgcctgcactcgttggcgatctgcccgcctatcgcttcatgccccaccgtacccggggcgaaggtctctttatggcaatccttcggaaaccgggcgaacccggtgaaactcgacgagaggctctcctctcgacagccgaaaagacagagaaacgcaacaaaaaaaataaaacaccccgaatagctatacccgatgaatggaggcttctcgttgccaaccccgaccgctatacattcatatccgacgaagagaaaattatcgctatcccggccgagtatacaaccgattataaactcctcgaccggaatctcgacctgttgcacgccggtatcaccgtagccacgctcaaaggaaaagactacgtgccacatatctcgctggcactctccacagccttcgatatgaataaagtcgtccgctacgaggcctccctcgacacagcccttgcctacctccgacgagaaagcctcttcctgcccaccgacttaccccgaggatatatacttgtcacctatgaaggatttcccctcggctgggcaaaacatcttggcaaccgaaccaacaacctctacccgcaagagtggagaatccgtagcggatatacgcccgatactccgttcgaattgaacatcgcaccgaaataacgacataaatattctctcggacttcccctctggcactgcgtgccacctccccctattgctgacgccacaaagaggaggaggaaaacacatacctctctgttcctgttatcaaaagtattaacacttctcccctgccgtgccccgtagtattacggggagttgcgttagcgatataggggagagacagaggagcggtagcgacgatgagaggggttagaaatactacatcattcttgcttatggtattgaaaaacgacatctcatcagtctgcttctatcggacatatcccttcctccctacttttacccgataccgatcgggtaaaaaaaattcaatcatgccataaaatgcgaatgccccgaccatacatttgcctcaaaaaaagtatggaaacacaagaacagaaattcacccgggaactggcaaatagccgtatgcaaatagaactgttacgcaatcaagtattgctgcgttattacgcacaattgctcgaactcgatattatgcagcatcccaaagaagtgaaaacgctcatgagcagcattaacaccctcgaacgttatgctcgcaaatacacccccaaagactctgccgaggttactcccgtctctaacgaaacccaaccgatgacaaacgggaaagaaacggcaacaaacacagttccacacgaaggagaaaaaaccgaaactattgaaccgaaaaaaatacagaatacggctgtcgcaaaacccaccccacatacgccggtcgaaccgccacacctctcatcagtgacaaatttccccgaaggaataaagataaagaaagttgtccatcgaagtaaaacacaccgaaaataacctccggggggaaaacacaaagtcgatttttcgaccacacggtcgtctccggcatcaattttcatatatttaaacttaccgaatacaaaaagcacattcgatataaaaataaataaacttgtttgttctgcgctcgactttcattatatttgcacgtgatgcaaaggaaatcgagcccggccgtgcaaaaaattttcacatcgggtcatttgttttttctttgtacagaaacaacgggcagaagcagtaactgcatcgctctttatattcctccttaaaatacagccctatgaaaactctgaaactgataaaaaacgacccgtggctggctccctataaacaggctatcgaaggccggcacaatcgtgccgtggaaaaaatttcggaactaaccggaggaacaggaaacctttccgattttgccgacggctatctttacttcggattacataaagaaaacggccactgggtatttcgggagtgggcgcccaatgccaatgctatctatttgataggaaacttctcgaactggaaagaacgccccgaatatcggttattagccatcggcagaggagtatgggaaataaaacttccactcgatacgttacaccatctcgacttttacaaactatccgtacactggcccggaggacaaggagaacgcattccggcttgggccacgagagtcgtgcaagaccccgaaacatatatcttctcggcacaaatttgggatcccgaaaagcctttcgttttttcaaaaaagccgtttcgcccccaaacctccccgctgctgatttacgaatgtcacatcggtatggcgcaacaagaagaaaaagttggcagttataccgaatttaaagaaaagatacttccccgcattgttgccgacggatacaacgccatacaaatcatggctatacaagagcacccctattacggttctttcgggtatcacgtatccagtttcttcgccccgtcgtcccgcttcgggacacccgacgaattgaaatcgctcatcgacgaagctcataaaatgggaatagccgtcattatggacatcgtacactctcacgctgtcaagaacgaagtcgaagggttaggtcgattcgatggctcgtacaaccaatacttttacggcgaccaccggcgagagcaccccgcttgggactctttgtgtttcgactatggaaaaaacgatgtaatccacttcttgctctccaactgcaaatactggctcgacgaattcaggttcgatggtttccggttcgatggcgtcacctcgatgctctattacaaccacggtttgggacaggctttcggttcgtacgacgactattacaacggagggcaggacgacaacgccatcgtttatctcactctggccaatgaactcattcaccaagtaaatccgcgggcgataaccatcgccgaagaaatgagcggaatgccgggattagcagcgaaattcaacgacggaggaatagggttcgattaccgaatggctatgggaatacccgatttctggataaagaccattaaagagaaaaaagacgaggactggaaacccacggccatattttgggaactgaccaatcggcgttccgatgaaaagaccatcaattatgccgagagccacgaccaagcactggtcggcgataaaaccattattttccggctcatcgacgacgtcatgtattggcacatgagcaagggagataccaatctgatcgtagatcgaggcatggccctgcataaaatgatacggctggtaaccctctcgaccatcaacggcggttacctcaacttcatgggaaatgaattcggccaccccgaatggatcgattttccgcgtcaaggaaacggctggtcctataaatacgcccgtcggcaatgggacctcgtagaccgaaacgatttgaaatatcaatacctcggagccttcgacgaagccatgattcacatcataagccaaaagaaaaaattcgaacgaacccctatcgtcaaactctgtgaaaacgacggagaccaagtactcgcattcctgcgcgacgatctgcttttcgtattcaacttccacccgttcaaatcctttaacggatacggcattttggccccgacaggagaatacgagcacatactcagtagcgacgatcctgcattcggaggatacggactcattgatatgaaagtgaaacacctcacccgacacgatccgttattcgaaaaagacaacaaagaatggctcatgctctacctcccggcacggacagctcagattttaagatggaaaaagcccgaacccggagaaacgaagaatgcaagtaaatcgaaaaaatcggcaggttcgataaaaaaagagaataaaagcaaaaagaaatagtccatcgacaatccgtttagatatggaaaagcgtaataaatgcaaagctcgaaatgcagtaattcacacaattggcatttattaagtagtaatctttcattcggaagctcatgaaaaaaatacttggaacgctactgatactcacaaatatcgtgatattctccggttgtacttttattaacgaagaagaaaaattcaatccggtcgctttgaaaatcgaaagtacagatttggcacaaacgacccgagacgaatatacgataccggcgggaggagggcagctaactgtttatagtgcagaagaaaaaaatcctttttgcctcgtcaactggttcgaagtaaacggtgtggaatgctacctgaacggagtagaaaatgatttatacaacgacagggcagactattcctacgactggggagaaattatcatctcatcggccactctaccggtcaaaaacaatattacaattcgtccgaatctttccgggaaagagaggaaaattcgcataggactcaactgtttcaaatacgattatagaattctggatataatccaactttcgaatgaaagcaacccttaacgagctttacaaaatcgagttacgacgaagatagtctattgagaaagccatgataccgaaagtaatcgaacaattaccgaggacatttttgcctcttacagaatctcctgctcgaatttccggcactccaccgacgaaaatcgaagaaaagaaacaagatagatacatgtttgtaacgcttctgtaacatcaatatcgtttctttgcgagtgaaaaaacatgcaaattggacattatggaaacgttctatctgatcatcgttatttttatctttctcatcgccattttcgatttatcggtgggagtcagtaacgatgccgtcaacttcctcaattcggctatcggggcaaaagcagcccccttcaaagtaattatggcggtcgccgcaataggaatctttgtaggagcctccatgtcgaacggtatgatggatatcgcacggcatggaatatatcagccccaatatttctacatgaacgaaatcatgagtatcttgttggcggtcatgctcacagatgtagttttactcgacatattcaatacgatgggacttcccacatcgaccaccgtatcgatgatattcgcattgttaggcggcacatttgctttggctatcgtgaaaacgataaatagcgcaggagccttgcaaatgggagacctcatcaatacagacaaagctctgcaagtaatcgtagccattttcgtatccgtagccatcgccttcttctttggtgttttggtacaatacatcgcccgcttgattttcaaattcaattaccagaaacagttaaaatacttcggtgcgctgttcggcggattcgcggctacctccatcatctatttcatacttatcaagggattaaaagagtccacgctgatgactcccgaaaaccgccaatggattcacgacaacacacaaatacttttaggctgttgcttcctatgcacgacaatactcatgcaagtactcatgtggtgtcgcataaacattttgaaaatagtcgtcttgttgggaacttttgctctggcattagcttttgcgggaaatgacttagtcaactttatcggtatgcctttggccggttattcgacctaccacgactacatcgccaacagcaacggcgtcagtcccgatcagtacttgatgacctctcttctcgattcggcttcaacgccttccatattcctcatcggttcaggtataattatggttgtcgccctgctcacctccaaaaaagcacataacgtaatcaaaacctctctcgacctatcccgtcaggaagccggagaagaaagtttcgggacttctcccatcgctcgtaaattggtgcgcatgacaacaaatacatcttcttttattgtcaataacataccgcccaaagccagaacttggctcaacgcccgattcgacaaagacgaagtcatactcgaacacggtgcggcattcgacttaattagagcctcggtaaatttggtgcttgccagcttgttgatcgcattgggaacctcgttgaaactacccctatccactacctatgtcacctttatggttgctatgggtacgtctcttgccgacaaggcttggggacgcgatagtgccgtttaccgtatcaccggagtcatctccgttatcggaggttggtttctcacggccggagccgcttttttgatttgttttacagtgacgatgattgtctatttcggaggtagtatcgctattatcctgttgggagcattagccgcttatatgctcatacacagccaaatatcatacaataaaaaactaaaacaagaaaaaaacagctcgctggcacaacagatggtcgccaacaaagacaagcaagaagcacttgtcttattgagaaaattcagccgggaagaattcgccaaagtcctcgaatggagtgccgacctatatcatcgagtcaccaccggtttcctcaacgaaagttacagaaccctgcgcaaagcgatgggcgatatagaaacggaacggcgatacttcaaacaagtaaaacggttgggaaccataggagtctcccacttgaatgacaaagtaggattagaaaaaggtctctattattttcaagggaacgatttctcttacgacattatccactccataaaaaggacctgcgaaccttgtttggaacataccgacaataatttcaatcctttggagcaaagtcagaaagacagctttggagagatagcacaatcgatcgtatcgttcttggaggaaagccggcaatcgatcgaaaaagatgcgttcggagatcttgccgccctctacaatcaagggaatatactcatcaatcaattaggtgtactcaaacgggaagaaatacgtcacatgcgggaacaagtctcctacatcaaagtaggaatcgtttacctcactgtcattcaagaatcccaaaatgtagtagcttacacgataaacctgttgaaaatgaatcaaaaatttcaggaagggaattaataatcacataaagtctcaatttgcatcttttaatttttgagaacttgggttgccttttgcgggagtaaagggcaactctctttttatagacaaaaatagggcttatcatttctgaatataccctatcggttataatggctcagtcgataatttagcaaagatatgactccgtggaaaatcagaaagaattatgtttttatacatctaacccctctcctcagaaactatcgtttcttcggtgtctcccctattgctaacgcaactccccgtaatgctacggaacacggcaagggagaagggtaaatgcaatccttctctttcgataaaataatgtggcagaaaggtattaaacctcctcctctgtgttttgcaccgcaaaatataggggaggtgtccgaaagacggaagggttagttctacaaagatactatatgccatcttttcaacccctctcctcgtcgctatcgctcctctgtctctcccctatatttcccctacggaaacacaggggagaagtgttagtaccttcgataacaggaacagagaggtatgtgtctccctcctcctctgtgtggagcagccatatagggaaggtggcacgcagtgacggagggattaaaatccgcaacagaggaaacgtatcaacctcatcgatgagtccgaaatgggattattgccaaagaattcatcgctaaaattcaagcctatcccccacggattttctaccgaatcgttgtgcttcgatttcgtattatttttcttcatgaggaacgatacgaatccccacgtcggaaattcctctgatacgatcgtcccgcatagcttgttgcacagtgaagacatgttccttctcgcccgaaaaacggaaatcgtcattcagcaaaacctcctgctgataataagagccccaacctccgcccgaccatcgtccgaactcatcggccaattcacaatttaccgtatcggttttcaaaactccgccctcgtcgttgtaagaaacgaaaagccacaaattcctatacgtataatctccgttatgccgcagagacaaatagacatcataccggttcacagtatcgggaacttccggtgtaaagcgttgtacgtcccgtttgaaccagccgtttttaggaagggtattaaactcgttatacacatcggttcgcccgcaggagaccgtgcctcccagcaaaagacaaacgatacctgtatttaccaagttcctccacatacgcccatctattctttcttatcggaagcggcaggtttagacgaaatgttttcactaccgttgcgagcagcagccgtatggttgccattgtcatttccgccctttttatttccatcacgggaagccttgttctgattccgattgttattattagaacggttattccgttcgcccgactgttgacgacgattgttattacctccgttattattccgtttcttatttttcttcgccttatcgaagcgagtcaaactgtcttgtcccaccacgtcttcgaaatcacgacgttcgggagcacgagctccggcttccgactccaatgtatcgggctttattcctttcttattcaaagcaattacctcgaataccctatcggcagaaatcgttaccaaattggcggcaatagacttatcggtcgaataagtcatctcacgtttgaaaatatcggttttgaagtgataataggtatttatcttcgtttccaacggaatctctcgcgatggtaaccgcttctgggcttccacgtatgcatcggcctcataattcaagcaacatttcaatttggcacattgtccggccaacttttgaggattgagggctatatcttggaaacgggccgcactggtcgctaccgagacaaagttggtcatccaacccgaacagcacaattgacgaccacagggtcccaagcccccgatacgtccggcctcctgacgcgccccgatctgcttcatctcgatacgcaccctgaacgcttcggccaacactttaatcaactggcgaaaatcgacccgctcgtcggcaatgtaatagaagatggccttattaccgtctccctgatattcgacatcgccgatcttcatattcaaatgcaaatcttcggcaatcttgcgggctcgaatcatcgtatcatgctctttcgccttagcttcttcgaatttttccaagtcattgggtttggctttccgatagacacgctttaactccggattatcgatctttacattgttctttttcatctgtatcaagactaaacgcccggtgagagtaacctcaccaatatcgtgaccgggcgaagcctcgacagcgaccaaatcgccgggagcgagtttgatatgagttgtattacggtaatatccttttcgggtatttttgaaacgcacctcgactaaatcggtatcgtcgtgcgattcgggaatatcggatagccagtcgtagacttccaatttcgcacctttccgacgacaagcgcacgggtcgagctgtgttttttccgacggatttatcgtattgttatcgtttgtattatccatttcgaatttgtcgttaacaagaacaaagccatagatcgtacacgaatttcattcgggtaacgccctacggcctcgtcattcgtttttaaagtggagcggtatggcgtctccttgttatttggcgaaacttacggcccgagtttcccggataacagtaatcttcacctgaccgggataagtcatctcgtcttgaatacgttttgcaatttcggtagacaagttttcggtttcggcatcgcctatcttatcggctccgacaatcacccgcaattcgcggccggcctgtatggcataagtcttcaacacgcccggataagacagagccaactgttcgagatcgttcaaccgtttaatgtaggcctcgacgatctcacgacgggcgccgggacgagctcccgaaatagcgtcgcacacttgtacgataggagccaacagactggtcatttcggtttcgtcgtggtgagctccgatagcattacaaatgtcgggcttttccttatatttctccgccaacttcatacctaacaatgcatgcggcaattcgggttcctcatcgggcactttacctatatcgtgcaacaaaccggcccgacgggctttcttgggattcaaaccgagttccgaagccataacggcacaaaggttcgccgtttcacgagagtgttgcagcaagttctgcccgtaggaagaacggtatttcattttacccaccagacgaatcaattcgggatgcagaccgtgcacgcccaaatcaatggcagtgcgtttaccggtctcgatgatttcttcctcgatctgtttacgcactttggcaaccacctcttcgatacgtgccgggtggattcggccgtcggttaccaactgatgcaaggccaaacgggcgatttcacggcgaacgggatcaaaagccgaaagcacaatggcttcgggggtatcgtccacgataatttccaccccggtagccgcttcgagagctcggatattacgaccttcacgcccgataatacggcccttgatttcatcggattcgatgtggaataccgtaaccgagttttcgatagccgtttcggttgctacccgttggatactttgtatcacgatacgttttgcttccttgttggccgtcattttggcatcgtccatgatgtcgttgatataagaggctgcctgcgtcttggcttcttccttcaaagattctaccaaacgttctttcgcttcttcggcagagattcccgaaaggtgttcgagccgttccacttcggacttatggagtttttccaattcttgttttttcttctctaccatttcgagctgagtatcgaggttggcgcgaatggcatcggtctcacttttcttcttttgcagatcttgttgctgctgggaaagctgcatttcccgttgtttcagtttagcctcggccgactgtatcttggcattgcgggcattcgcctgcttttccatttcggctttcatgtggataaacttctctttcacttcgagcagcttgtttttcttaattacttcggcttctttttcggcctcttccaaaatcgttttcgaccgagtcgccagcagatagcggttcaccaaaaagaccacaagcccccctatgaccaaaccgccaattactgaaaaaatcaatagtatgtaattcatcttttctaaattatagttataaaaaaagcactaccaacctgtcctttcgaaggacctgtcgcagtgcaggaattatctctcttttccgtaccgttattctccggtatgtccgtctaatatcttcgcagcctcggcttcaagttttcttaaatcggccagcaaggttttacggtcttgtaccatttcacagtacaatcgagccatctctaccgccaccatcgccatcatagattccgaatccatcaatccgtctttatacttgtccttataaaaagcccaacgcttgttgaacaagtcggcagcatctctccaatatttttcgtccgctccataatcgacccgcaaggctaacggggttttcagatcggcgatcctcagagttatttttaatttatcatcgttcatagcatctattcattcaagagtgagatgcatttatcgatttcccgcactaatctggcaaacctgacttttgtttcttcggtactcgaaccatcttgccccgcaaccgtcttcgagagtttcaaatttccatatcttttctccaactcttcgtacttactttgcaaagcttgcatctcttgtttctgatgcatcaactgctctttcaaaataccgttttcgttctcgaaagccttacataaatcactcatagcatgaaacttagcaatcagtgaatctattatgtctttcgaacttccggccattatcccaccaaatttctatacaaatataggtatttcccgccaaaagctgtaacatcgacccaattatttctttttttctctcttttattacaaattttaaatttatttatctcttatcgccaaacaacgatatagaaagaaatcaatcaaaaacagctgttcaaaactgggagtaaatgaaaggaaccagttcgctcgaacgcacctgcaaaacaaagaagagtaccagcgccagaatagctgccttaactaccagcggcgaccacgaaagctcgcgttgcagccactgcgaccagcgatgcggggcaaaatggagcagataaccgactaccaaagccacgaatataacggcgtatcccgacacgaaggagggaatggcttcgggacggaagttggtgaatatctgggttaatatctgtccggcaacatcaagagaaggcgaccgaaagaatatccagccggcggccacaacatggaacgtgagcaaaacatgaaagaaatggcggataatacccgggcgatcgtctttcgccacagggaatatacgccggtaaactttatggacaatcaacaaaacgccatgccaagcaccccatatcacaaaaagccacgaagctccatgccaaagtccacccagcaccatagttatgaacaaattgaaataggtacggactttgcctcgacgattcccgcccaaagatatatagagatagtctcgcaaccaactcgacaaagagatatgccagcgacgccagaactcggtaatagaacccgacttatagggagaatcgaaattgattttaaaacgataccccataagcaaggctatgccgatagccatatcggaataacccgaaaaatcacagtatatctgcaaggtatagccatagacacccataagattctcgaacccagtatagagcatgggattgtcgaaaatgcggtctacgaaattgacactaatgtagtcggagataaccacctttttaatcaatccgcacatgacgagaaaaagaccttcacccaacagcataggtgtaatctccaacggacggtgtatctgagggacaaagtctttcgcccgaactacgggacccgccgccaacggagggaagaacgagaggtaaaaaacataatctctcaaattcgtcaccggggacatttgccgccgatacacatctataatatagctcaacgaacggaaagtgaaaaaagagataccgatgggcaacacaatatccaacggctcgaaaggctcacgggtgaaatcggcaatcgtacccagtaacaagttggtgtatttgaaataacagagcatgcccaaattgaccgccatgctcatcaaaacgaaaaatcgacgcatccatttccacgaaacccaacctaaaagccgccccaacgaatagtccgaaagggcgacgaaaagcaacaacaggaaacacagcccactcgatttataatagaaatagagagaaaaaagtatcacgaagtagatacgcaaagtatcgcgcctcgccaacaacctgtatatccagataaatccgacgaaaagaaacagaaacaatccggtattgaacatgagcggattctgcccgtcataaacgaataaatccacgactttcgatacgtcgatactttcccaaaaggagatcgcaccggtctttatattattgagccactctatccacatattcctgataagctttcataagagcacgatacaacatttcgccctgcacccgatagcccgtctcggtgcaatgggtacggtcataggccatgaacccggccttccgccattgcgaggacgaaccttcgcctccggcaatttcgtaccaatcccaacaagccagccgatgctccaccgcataggaacgaatcgtttcccgaacgagttttacccgagcattcggcgtataataaactctacgttttttatttacgcgacgcacccgacgccgagcacattcggccggagtagtcagcaaaatttgagcctgcggacaatcttttcgcaaagacgaaacgacggtatcgatctgtttatataactcgtcgcgggtcaaagaggtggaaaacgactcattcgtacccaacgacaaaacaataagcgacggcgagagtgctgccacttgctcggaaaagccgggaatggcagcataactactgtaaaaagccccgttgttgccgatagtgtggtaaagaattccgctctcaccggtttcaaggctcgctccataaatggccaaaggcgtctctttcgagacggcttctcccgtaagatgaacactacacacggactcctcccacgaaaaatgggtcaaaaaaggtaatcgggtttcaccctccaccaaaaagggttctgaaattactcccggaaaagagtcaaccggcgcatggaacaaacgaactttcttgaaacctgcacagtcatcggtcttactaagcgtggaaaccgtcaaatcaatgcgaccgttacggggtacaatagctataccgcctactcccggtgtatagttactatacttccgccctacacaacgagaaaaattccaacttccgtccgccacgaccgaataatctctcggttcattggtcttcgctaacttcaaaggaacgaccaacccacgccctgcatccccgaaccttcgctgcaacggtaatcggacagcctcggtgagaaaccctgcctgaacatgcgaatcgccgatatgaaccatcgccactacccgaggaacagtatccgtgtcgttctgcaaccgtaccattccatcgaacagagccgaccaatcggcatcgttaaactcgataacgtttttctcttttttcaaaaaagagggtacagtaaccgtgtcgcctgtcagctgtgcacaaagttgcactgccagcactgcgacaacgaagaaaaaccctattaccgacaaacgaaatttcataagccttcccgattcatttcatactccaacgacttgacaaactcggtcgccaatcgtttaccgcctttatggttaatgtgcgtatagtctttattcgcctgtccgttagcgacataatcgagcattccgttgtgccctcccatcgcctcgtatgtatcccaaaaaacgacaccagcacttcgtgccgcacgacgttgcgcttcggaaagagcgactaccgccggcatcgtaacgaaagccccgttcgctttgcgactgcgatcacctactcccatcaatataatatcggtatgcggataacactcccgcaagtgacgaacaacctctgtcatcttacgggcataagacccgtaatgcaaaatttcgggagtcatcacattcagtccgtattgcaacacaatggcatcgtagggaacgatactgtccatctgaatcgccctttcccgggacaacgccccgagcgaaagacccgaataaccacgggtcgatatattatcgacagcaatgccctgcacatcgtccagccacacgcctatggctgcaaatcccggcgtatttcccacccttacttgaaaacgtggggtttgcccctctaccgccaaagattgaatctcatgagaacccgcaacgggaaaaacctgccattcgccatcggctattttcaactcgaccgagcaatcctgccgggcgataaatacgaaacgagacagtgcccaactatcggcatgttctattttcgcagttcctctgtattgagccgtagcaccctccaacggtacgaaatactgctgctgcaaagtcatgactttccagtcgacttctttgggtttcaatacactatgcacttcccaaccttcgcccgactgtatgaccgatcgacgaaatccgggaaaatcggaatgcatagacacgtatcccacaccactcccaccataccgggattgcaacaaacttcgcacgtcttgcgtgaatatatcggcctcgataaacgaatcgcccaaaaatgccaaacgcacgggacgtcccaatgaggctcgttccttcaaggacgagagaagatgagacaaaccatttttccccggcgagaaatcttcgaacaaaaccacatcgccgtcccgtcggggaagattcccgacctctgccgtatcggacgaaatattcgttacgagaagagtgtcggctgtttcttgtacccttatcgtatcgggcacgacttgccgatcctgcggctcatctttctccacagaggaaagagaatccaccccctcgttcaaccactccattccctcctcctgccactctgcatcgcccggcaaatccaaatcttgctcatcgacacggatatcggaaaagagatcgacaggttttgtcgcgaatccaccccactccaaaacaggcaactgagtcaggagaaacagaaaaacgagagagagcaccaacagagcaaccacatgcccgtctttgtatttagaggaattattcccttgctttttattcttcacttcggctattcaaatgagactacaaaaatagagaaaggagagtggagaaaaaagaactcgccctatttttctaccgagctacctcccatttccgcatttcacacaaaaatagggaaagatttatatctacgaacgattccttccaaatttcactcgtcccattcacatttcttacagttctctccctcctcacgattttttcaagaaacaactatcctatttgcttttttcagattttttttctaatttagctttcggaatgttgacactcgccctattaccgcctatcgacgactgggtatacatcgtggtctatacgatatatgccattaccatactgggtacgatcgtgataatcatcacagagaatcgcaatccggtaaaaagtttggcatgggtactcgtattggcatttcttcccatcgtagggttggttttctatatttttttcgggcagaatttcaaggcgaaaagaatggtttcccgacgcataaagaggaaattacgaaagcgggattatcattcgatcgtcaatatcgacagtcttccactgagcgaggagagcaagcaagagataagattgtgccacagtttgtgcagtgtaccgtactattcgggaagccacgtgaagatattcacttcgggagaagacaaattcaaacactacctgcaagatttggagattgcccaagagtatatccatatccaatattacatcttcgaggacgataaactcggcaaccgagtcaaggaggttttgcttcgatgcgcccgccgaggcatacaaataagaatcctatacgacgatgtgggttgttggtcggtgaaaaaacgttttttcaaagagatgcaggatgcgggaatcgccgtacgtcctttccttgaaatcacatttccccaactcgccagccgaatcaattaccggaaccaccgcaaaataacggtcatcgatggaaaaataggctacataggaggcatgaatatcgccgaccgctatgtcgaaggaaccaaatggggaacgtggcgcgacacacatttgcgtatcgaggggcctgcggtaagaggattacaattgttgttcgccgtcgattggagctacgaatgcaaagaggttctttcggattcccgattttttccaccggtagcagacaaagggaaaagcggcatacaaatcgctccgggcggccccataggggaatggtcgaacatcgccatgcttttcttgaaagcgattaccaatgctaaaaaaaacgtatatatacaaacgccttatttcctgcctaccgaaagtttggtgaaagccttgcaaaccgcagctctcgccaaagtggacgtgcggctaatgataccggaacggtcggactcgacggtgttgcgttttgcatcgttttcttacataacggaaatgttacgcgccggggtaaaagtttacttttaccaaccgggcatacttcattccaagacgatcatcatagacgacgagctatgttcggtaggctctaccaacttcgacttccgcagcttcgaacacaatttcgaagccaacgctttcatttatgaccgagaggtcaacagtgaaatgaaacgtattttcttggaggaccagcaacaatgtcgtcgcattatccaacactattggcgacaccgtcccctctatcaaaaagggatagagtctatcatgaggttattgagccctgtattataaagacggctcccgaaactcttcgctcatattgaccagccatatcttctcggtcgcccgggtgaaagccgtataaagccaacgatagaaatcgagcgaaaccgcaccctgagggatatatcccatatcgacatagacatgtttccactgaccgccttgcgctttgtgacaagttaccccataggcatattttacttgcaaagcgttgaaccacggatcggttttcagccgtttcattttttctctctttgtcgtaacgtcataatagtcggccaagacttgcgcaaaaagagtctcctgctgttcccttgtcagagaaggggactcactggtaagggtatccaataggatcttaacttccatctcgacttccaaatcagggaaataaagttgtacatcggcaaagcggaaaccatacatatcggtacgtttaagtactcgcacgacacgggccacatcgccgttagcgatgaaatcgacctctttatagtcctttccccagaaatagttattcttggcgaccaacaacagatcgcctgcggtaagttcctcttcccgatagagtatctggttgcgaatcccctgattgaatatattggcccgtttattggaacgggtaacgacaatcgtttcgtcgagtccgacacggtcgtaagagtcggatatacgttctaccaaatactctccgctaagagcctcgacatcgggaaacccattcacccgcaagcagggtcggggcaatggcatctcttccatacattcccgcaaacgggtggcattatagaggattcccgattcggcagcctgccgagcgacctcccgcaattcatattccacgacattcaatccgtaaccgcccataacggcggcatccaaagccggactacgctcctgacccaccggaagcagctgtgcagtatcgcccaacaaaatcaaccgacaatgctcgcctgaatagacatactcgaccaaatcgtcgagcagcctcccggaaccgtaaaccgccccttcacccaccgagttggcaatcatggaggcctcgtcgacaataaacagcgtgtgtttcgccagattttccccaataagaaatccttccatatcgggcgaatagctcttttgccggtatatcctccgatgaatcgtataggccgggtgacgagcataccgagaaaacaccttagccgcacgccccgtaggagccagcaataccaccttgctctgtaactgtgtcaaggctttgaccaaagctcccaccagtgaggttttaccagttcccgcatatccccgtagcaggaacaacgagtcgtcccgtccgtcgaggacaaaagcggctagctgctgcaacaactcactctgttcgcgattcggttcgtacggcaaacaactttctatctgttggacaagcaggtcggtaatcatgtgcaatcggttaaagcatactgcaaaaataacgtttcccggtttctttacctacatttgtataggataaaataccagagtatttttgcaggcatagtcaagccgaatatacaattttcatttacctcagcgctctcctttcactatatttgtagaatatcggaggcggttcggtatagtcaagccgaaaatgtaattttcgcttgcctctgcgctctcctttcactatatttgcaacaaatacgaaggcaaacgacggttatttccaaccacccgaccctttgcactacgtgccgcctctcctatattttgccttgcaaaacacaggggaagaggctaaacccggagataccttgctctgtttgcacaaagacagttaaaacaaattgacgatggaaccgatagaggcactgaaccgaccgataaaagagagtcacaaatacatcttggcgatgtatgccgacggttcgtatctgtatattttattacaacacacggagaatcgtgatgaaatcgtaacggaacgtttaccgctgacctcagaaaagggagttccttctatcgaagaggctgttttctcccaacccatattgactcgtccgttcgagaaagtctttttcatagccgactctcctcggtttatctttatcccagacgaattcgcttcgacggaggacaatcctctctatttcgatttttgttttccagacagcgaaggaactttgatttcggccgacctacctcaaacgggagcgaaaatacttttcgacctgaacacagagctgtcgtctttcgtgaaacgcacgttggaccgccccgtactgctacacaggctggctccggcgtgcgaatactttttcagaaaaagccgattgggatatacgtctaaaatgtatgttcactgggaaaccgaccatatcgatttgttttgtttcaaccaacagggcttcctgctatccaacagctttcgcatacgccatatcaacgacggtatatattatctattaaacgcttggaaacaattgggattccatgccggggaagacgaactttccttgtccggggaccatgagaatctccgacaaaatgttatcccggctcttcggaagcatctgtcttatatcaccttgacgaagtttccttcccacgctctcaccgggaaagagaatctgccgttacctctacgcctaatatccgtctacatgcgataacccgacaccaccatatcccgtaaaacaaaaaaatgctttcgggattcagtcgaaccccgaaagcatctctaacctaatcttccgaaaagcctataattcgaatttatacatacgagccaatcgcaactgatactcatattccaaagagagtttattctcaaaagcttcataaagttgcgtagcatctaccaagtactccaccatcgagatcttgccggatgccaaagccttctgtaacaattcaaaattattctgccgagtcaacagctcatatctctcccgattatctttcaatgcaaccgcttcgttataggaagactgcaacaccgccaacgtctgcaactccttgttattaacggtgaaagaaccggccaccgcttgtgctttggctatcttcactttcttgcgattggcaaacaaaggaatggaaacacccacggacaatccattaaaacgctcgcccaattcgtaggcatgacgatagcccagctcgaacttcggcaaccagcctgcccggttgagagagatctccttaccggcgatctggttttcctgccgcaacatttgtaattcgggatcggattgcaacgcctgttctttcaagtcatcgaacgatgccggcaactccctatcggaatattccgtcagagccgactccgccaagttcaacggctcaccgccattcaacgcctgcaactgcgccagacaagcggccagctcattccggcgttgtatattgctcgtcgtgatattcaactgctcgatttcgattttattcacgtccagaatattggcatcgccagaggtcagccgttcacgatatagtttgaccaactcgtcggcggcagcttgcctctcgtttcccaaccgaatacaacgattcaaatagatcacctgcaaacacagctcctttgcctgcaacaatatttgttgtcgcaaaacagcctgctgcccatcgtacaaagtacgtttcaaattccctattttattccgctgaacatatagcgaaggaaaatcgaacgactgggaaaccgaaatatcgtacttgcggtctttggcattgtcggctccccataaatgctcgaactcgaagttagggtcttccaatgtgttctgtgaagatacttcggctttctgactcaaaacgatttgagctccggctttcaattcgggattattcgtttcgatagaagccaatatatccgccatattattttgtgctcccatattcgcaacagcgaatacaaaaagacataaaaagctatttctcatcgattttcttttttacggttcataatccaataaacgaccggaacgacaaaagcattgaggaaagtcgaagttatcaatcctcctaaaatgacttttgccatagggctttgtatttcattccccggcaaatcgccacccaaagccaaaggaatgagtgcaagagccgatgtgagtgccgtcatcaatatggggttcaaccggtcgagcgagcctcttaaaatggtatcgtgcaacgaattaccttcggacagcatcgtattatagtgcgaaaccaacaacataccgttacgcgtggcgattccgaaaagagaaataaatccgataatagctggtatgcttatctctccggtcgtaaaacgcaagataaacacgcctccgataagtgccaacggaagattcagcaagatgaccgccgactgcgatacgcttcggaactgattgtataacaacaagaatacaaccagcaaagaaaaaagcgaaacgaacgaaagcgtacgagaagctgccgcctcgctttcaaactgtcctccatactcgatgaaataaccttcggggagcaccacggtttcatcgatacgttcccttatatcgtccactacactacgcaaatcgcggtcgctgacattggccgatatgacaatcttacgtttcacattctccctattaatcgtattgggccccgtggcggacttgatttccgccaaataactcaacggaactttcccgtcctgggtatcgaccatcaaatctcctatcttggccgccgaagaacgttcatcgtcttttacttttaccgtcaaatcgaatgtgcggcttccttcgtacacctgcgacacaacctcgccagccaatgcgacatcgataaattcggcgaactcggacagcgatacgccataacgagcaagcatttccctgcgcggagtgattttcaattgcgggcgttcgatttgttgctccacattcaaatcgaccactccatcgattgccgaaatattcttcttaatctgattgcccaacataaacatgcggttcaaatcatcgccgaaaagtttaatggcaatacgtgcctgagtaccggaaagcatagcgtcgatacggtgagaaatgggttgtccaatctcgatattcacccccggaatcaccgacagttttttgcgtacatcggcaacgacctcggcatgcgaacggtctcccaatacaaagggggcttctatctcggaggtatttacgcccaaagcatgttcatcgagttcggcacgtcccgtcttccgggcgacagtctgtatctcgggaacttcaagtagaagttcttctgcccgacgaccgatattgtccgattcctccaacgagataccgggcaaagtgctcacgttgattgtaaacgaaccctcattaaaaggaggcaagaaactacgtcccaacgtgaaaaaggtaatcatggcagccacaaacagggcgatagtcccgcccagcacaccggtacggtgacgcagcgcccactccaaagcttgcccataatattttttcaaagtacgggcgacaaacggttcacgactaatatccttatcggtctttcctttgcccaacagatagctgcacagtaccggcgtcaacgtcaatgcaacgacagtcgatgcaaacaacgcgacgataaaagcaataccgagaggcacgagcatgcggccttccatgccggtcaggaaaaagagcggaataaaagtgacaataatgattaatgtagaattgagaataggcatacgcacctcgcgcgaggcttcgaacacgacttcgacaatcggctttcgttgtcccggtggcaacagtcgattctcccgcagatgtttatatacattctccacatcgacaatggcatcatcgaccaaagatcctatggctatggccataccaccgaggctcatcgtattgatggtcaaccccataaaatggagcgccaatatagagaatagtaaagacaacggcaaagcgaccaacgaaatgagcgtcgtacgcacattcatcaagaagaaaaacagaacgatcactacgaatatagccccttcgtataaggacttttgtacattgtttatggaactttcgataaaatgagactgacggaatatatcggtcgaaaccgtgacatcggccggcatatttttctgtaactcgtccatcgaagaaagcagtttttccgtgaggtcgagagtactcgtattgggctgcttggtaactgtcagcaaaacggcaggattggcccgaaccgaagccgtacccaatttaggggctttgtctcctatcttcacctcggcaacgtcgcccatcaacacaggaacgccatcgacccgttttaccacggctttggcaatcgcatcgacgtcggtcgtagcgacagctccccgtacaatgtattcattgccatattcatacaaaatacctccgttggcattccggttcatctcacgagcagcattgagaacctcgtccaatgtgacaccgtactgtttcatacggggcaagtccaaaagaatctggtattccttcatctcgccgccgataaccgtaacctgagccacaccgccgatagaaagcaagcggggacggatagtccaatcggccaacgtgcgcaaatctctcaaagatgtagaatcggacgtcagaccgataatcatcatctcgccaagaatagaggattgagggcctaatgtgggagttcccactccctcgggcaaactttcacccacgacagccaatttctcggaagtaatctgccgtgcccgataaatatcggttccccaatcgaattccacccaaaccaccgaaaacccggtcgtcgaggaggaacgtaccctacgcacatcggtcgctccgttcaatgcggtttctacggggaaggtcaccaaccgttccacctcctcgggcgccatacccggagcctcggtcatgacgactaccgtaggagcattcaaatcgggaaagacatcgacgtccattttcatagatgtgtacaatcccgcaaaaagtaacaatacagatgccactaaaatcagcagccgattgttcaaagaatatcggataattttattcaacatggctgtaatgtattagtggttgtgcgaatggccttcgggaatcactccactattggcggcgagttttacctgatagacaccccgtgtaacaacttggtcgccttcgtgcaaaccggacaatattctcacattctcgccatcggaatttccgactgtaacttcttgctttttatacccttcttcgtccaaacgcaaatagacgaaatagagcccttgttcctcggttagtgccgaaacaggaaccacgatcgcattatcgatcgatgccgtcaacaaaaagacttctatgtaggctccgggaactatctcgcccttattgtccaattcgaaaaccacggggatataagcacctcccgccaaagttccctttccgaaactcaacaatcgcccgttcaaccgagaaagctcatacacccggtcgtcataaggtgtcttgaaattggccgaaacaaccgctggcaattccttataataacgttgaggaacttcggcccgcaattgtaaacgtttattttgcgaaagggtcatcagcggttgtcccatctctacaaaatcaccgtctttcaccatgatatttttcaaataacctcccataggggctttcacggcactgcccgactttcctccaccaatggcttcataagccaatttcgccgtctcatagtctttatatatctgttcgtattcctgtcgggaaataatctgatcctttaccaactcctgagcacgctcataggtcttgcgagcagtttcgtaatcgatataagcccgtttagccggatctccggtagccatcttctcggcagaaacattcaacaacacactgcctttggcgaccgaactaccatcggtaatatgtttaccggccaatgaaaccacaccggcaaccggcgaaacaacggttacttcatctccctgtgcagccaataaagttcccgagcaagaaataacgccgtgaaatttttcgggacggatagtcttggtcgttaaacctatggcttcggcctcggcttttttcaaaattatctcgtcgctatgttcttcggcttcatggtcatgaccttcgtgttcgtcgtgattatgatcatgagcttctatatgatcgctatgttgatgctcatgttcatcaccatgagaagaagacgaacccgaacacccccagaatatataagtgaaaagaattgagaatataatatttcgtttcataggtataattaattatggaataaataatagttatcggttcggatacaaaaataccgaacgaattttctcttatggaattaagagatatttatacctatgcgacgggaggagcccgcagccccaacgttttaagaaaagtaaatgtatgcagccgctcgatgtaaataccgaaacagggagatacctccaaactgtcgataacgaaatcggacaacatagcccacgtccccaacaaaatttttaccggggcaaactttaatgtaagatattgatttaaagaaactgtatcgaccggagccttatatgcaaaccaactacaaccgctgcaatcgccagccttttcggggacatcggacgaatgggtatctcccgactctgcggcatcgattacccagcagatcataccattctcatgatggtgatgaggaatcaccgtcgaaaaaacagccagacaaccggccaaacaaacgaatagtattttcagttttttcgcccacataagacttaatcttgcagacaaaggtaagggagattatttcagaggagttatacaatcctttcttttttagaaaatttaaatattcgactctacacaacggaaaatacattccgctatcccctattcgtccaagtcgtcatcttcgaaatcgaaatcaaaatcgaatccatcatcggcatactccgattcgaggaattgcttcatttgacgaccgtctcttttcgtcggtcgtcccaatcctttttggcgattgacaaaacctcctatacgcaccatttcgagcaattcgtattgttccggcggagtgatattctccaaatacccgggaactaattttgcccccatacgattttcagagagagccaaaactcgaaaagaatatgttacaggcggttttctcacttgtatgacatcgccaactttgatcattctggaaggtttcaccgcaactccgtcgagcatcacccttccctttttacaggcttcggtcgctatggtacgagttttaaaaatgcgggtagcccacatgaatttatcaattcttacctcgtctttcgccatatctgctatttattgttatattgattcatagtttgctgcacgccggctaaacaaaaactcttgataatctcgccggctcgttccaacttttcggggagttgcttctcctcttccggaggaaaagatcctaaaacgaactctacttgtcctccccgcggaaaatcattccctataccgaatcgaagacgggcatagcattgtgtacccaatatttcgcaaatatgtttcaatccattatgaccggcatcgctgcctttgggtttcaatctcaatgtaccgaacggcaaagccaaatcgtctacgacgacaagcatattctccaccggtatattttctttttgcaaccagtaccgaaccgcatttccgctcaaattcatataggtcgaaggtttcaacaaaaccaacacacgtccttttaaccgaagttcgcatgtagcaccgtaacgtccatcggtaaaaacgagattggacgccttagctaaggcgtccaatactctgaatcctatgttatgtcgggtattctcgtattcataaccgatattccccaaccctacaatcagatatttcatcaataaaacaggtttatcgatcgttatttagcggcagcttgcgcaccacgagcggcacgagtcaagttaaccgcacaaactacggcattcttggcgttcatcaattccaaaccttcgaaatggagttctcccacttgcaaggttttacccaatcccaaattgtcgatattgattaccaaacgttcggggatattggaatagatggcttttactttcagttttctcatcgacaaactcaatttaccaccggcacgtacaccctcagagtgtccttcgagttgaaccggaacttccataacaacgggtttcttatcggatacttccaagaaatccatatgcagaatagcatcggtcacagggtggaattgcaaatctttcaataccgccatctttttttcaccatcgatagtcaactcgactgcaaaaatatcgggagtataaaccaatttacgaacggcatccttagtcacagtgaaatcggtaacgataataccttttttaccaccgggaagttctaccaatttttcacagggtttgagcgctccctgataaggcaattctaccaactcgccaccattcagcactgcgggaatcaatccttgcttacgcaaaccttttactgctttcttgcccaaatcggtacgggccgtaccatttaattgaaatgttttcatcgttgtgttgttttgtgttactcaaaattaagctttcactgctccttaatttcccatcacacggaattttcaaaaagcggggcaaagttaacattttattttcttacccacaagcctttacgaaattattcctctcgaaacaaaaaatcggggaagcgttttttctccgctctcctttcgctatctttgtcactatgaagataggtgctcggcatagccaaatcggaaatagaatttccgtttgtctttacactcacctttttgtatctttgcaattcataataaagaatttaaacacaccaaccaccatgaaaggaaaaatcttggttaccggaggaacgggatacatcgggtctcattccacagtagaactgcaaaatgcaggttacgaagttgtcatcatcgacaatctatccaactctaacatcgaagtactcgacggaatcgaacgtatcacaggcaaacgtcctacgttcgttcaagccgactgtaccgatatggaggctttgcatcagctttttaaagagaatcccggaataaaagggatcatacatttcgcggcgagcaaagcagtgggcgaatcggttcaaaaacctttgctctattaccgcaacaatctaatgtctcttgttaatttattaactttaatgccggaatatggcgtagaaggaatcgtattttcatcgtcttgtaccgtttacggacaaccagacgttttaccggtagacgaatcggctcctatcaaacccgccttatcgccctacggcaataccaaacagatttgcgaagaaattattaaagataccattcatgccagcgctcctttcaaatcgatcattctccgttatttcaacccgataggggcacacccaaccgccgaaataggagaactgcccaacggcgttccccaaaaccttatcccatacttgacccaaaccgccatcggtattcgcaaagaattgagcgtattcggcgacgattatcatactcccgacggttcttgcattcgcgattacatcaacgtcgtagatcttgcaaaagctcatgtgacagccatgaatcgtatgcttgaaaataaatcgcccgaagctatcgagatattcaacctcggtacggggcgaggggtttccgtgctcgaactaatttctgcatttgaaaaagctacgggggtaaaagttcctcacaaaatagtaggacgtcgagaaggcgatatagaacaagtgtgggctaaccctgaaagagcgaataaagttctaggctggacagcacaagaaagcatcgaagacacgcttgcttctgcttggaaatggcaattgaaattacgcgaaagaggtattatgtaatgtataatcatctatctttctaaaaaacagagcctttaataaaggctctgttttttgtttctatcaaagttatcagaaagaaatatcctcctgtcttattgcattatattgcttttgtgagtatgaagataggctgcggttcggcatagtcaaatcggaaatgagatttccgtttgcatctgcactcgcctttcgctatctttgccttaaacagaaataagaagatatgccggaggtatgtatattctttggaattataatcagtttataaatgcatcaacgacccaaaatccagtataacaacaataaataattattttatatctctttcgtcaagctaaactccttatcggcaaataattcggctaacccggatatttgtttaaaccgtaataattcgtccttatccataccaatattccgcataatccagctatcggacataccggctttcgtcaactccgaaacaatttcgcacatcaattcgatacaatgcgtacctctcgccctattatgccgtatggtagaagccattctgttcgaaaggtctttatctatcaccaccaccggcaacaaacccttttccctgtcatatatacgcttggaggttttcataactttatagcgatgaaacccgtcgaccagttcatactggtctttctccggaatataataacacacacagggcatcgtatatccgtcctcccaaatagaaagttcgagtaatttcatctcgggcggagcaacaatattcggattatacgtattggcgaccactttttccacgggaacagcaatcacattgtaaaccggacttttatactcttccatttttcaaatcaatgctttatatttttccatcactcgttctttttgttctttctcggccttattcaaagaaaagcccatgtatttgcatgtatgatcgtttttaagaatacatatacacatgcgtttaaatgtggggagttctttaaattcggggatatcaatatcgtctaaatattccattcgtacaggttttttctcggtcctgtaattggaatggtcacctacggtaataggaattcccatcttttccagctttcgaatggtttcatctgccagacacccccctttatcccgccagaagttcatactcaccgacaattttcgctggtaatttttacgagtgttttccggaagcgttttcaacaaaaaatccaaatatccttcccatgtcatattgggtggaagtttgatagaatgccagcccatcatagatgtattcccatacaatccggcaaaattcaccccattgacccgacttaccattttcccccacatatccgggtctatcgcacgatacaaacggaggctcgatatggcctgcgatataaacgggctggccaccctttgcttatccaacgggaccccagctcgatagtagagatcgtacagcttgttataatcccaatgataccggccgttagcgacccacacgtcggtcgtcagccaatcgtgtatgggataggcattgcaaatgccatatttcatctcacgaatccacttcaaacctttatacttcctgtaattcttatcgctatgaatcgtgcgccaacgattgaaactttcttgtgtgcgaatgccgatgagacaacaagtcctgcgagctgcattccgcttgtgcaaccattcggcgaacttaatctgaaactcatagtcccataaatcatctgtataaaaatcgaagtcttctttcgtataacagttttctggtttttctcttacccataacgggcgcatagagtcctcccacgggcgccaatagttttgatacatcgaagcacacgtcgtaaccttgaacgggacgcaaatcctatatacatctaatatatcggaattagatgccaatactctgtctacataacgcgtcgtctcctcatattggacttcatagtcgatatgaaatacccccaatctacgattcaatttattctggcgaatataatcgatacataaattaagaagcacaccgctatcttttcctcccgaaaaagaaacatacacattatcaaaatcggaaaatatccgattcaatcgctccaaaacgacttcatacacactgcttctcagattctccatttgcctcatacaccatttttacatacaatttccacgttttcaattcagaaaatccacacgcccgaaaggcatcaacatgccgaacatgagaaatcgcataaagagtgcagtcttgggcaaactcttctttcgctttttcgataagagaagtcaacaattcggaagaatctcccgccaaatagtaattatcgatacaagctcccgcagtttttctttcaacaggcataaaaccttttacctcacctcgttccaaagcgatgaaccaaaggtgtttacgagaggttttaaacggataattattgttctgacgaataatgggaacactcataactaacggtgcaacaagggcatatagccgcgcatctgtccccggcaatttttctactatcatggtggagcatttttgtgattcattcgaaacataacatcggtatgttccaaatgcctctatcttattttagtcacaaaaataaaaaaagaatgaatatatacagcaacaaaaatgtcacaatttcactataacaataatatataaaatacgatttatcgttattctatgggcaaaccgtacatttaaaatgttttagaacatatccatttatattttttacaacacctaaaaacctgtcgcgaacaaattttttcacttaaaaatcatacctgtcttattccctttgtaatctttgtttattcacaaaaaatttttatctttacccataattataaaactttcttaaataatcgttttttaattagaagtatttcaattttagaattattctaattatatttgtaccagaattaaaaacacatcaaaaacaaagaatgctatgagtagtattaaaggaacaaaaacagaacagaacttattgaaagctttcgccggagaatcgcaagctcgtactcgttacactttttttgccagcgtagcaaaaaaagaaggttatgaacaaatcagcgccattttcatggaaacagccgaacaggaaaaagaacatgccaaaaagttctttaaatttctcgaaggcggtatggtcgaaatcacagcctcctaccctgccggcgtaatcggaacaaccgcagaaaacctgaaagcggcagcagaaggtgaaaacgaagagtgggtagatctttatcccgaatttgccaaaatcgccgacgaagaaggattccccgctatcgcacacacattccgtaacgtctccaaagtagaagaagaacacgagaaacgctatcgcaaactgttatcaaacatcgaaaacggaaccgtgttctccgacagcgaagaaatcgaatggcaatgccgcaactgcggatatgtgttccgtggcaaaaaagcacccgaagtatgtcccgcatgcgctcacccgcaagccttcttcgaacgcaagaaaaataactattaaaattcagtttcaaaaatctcaaaacaacccatcggtctgcccttatcgggtagaccgatattctttaattatggatattacagcattacgaaacctcacctacgggctatatgtcgtaggcactaatgacaacggccgccctacggggtgtatcataaatacttgttttcaagtaaccagtgaaaatcccattgtcgctatttccatgaacaaaaacaattatacccacgatataatcgtacgacatgggaaattcagcttagctattctcgcagaagaaagcgacacatctttaatcactactttcgggtttcaatgcggtcgagaccgaaacaaatacacaaattacgattatgagtggcaaaacgatgtccccatcttatcagggaaattttcgggacatattatctgcgaagtattgcacattgccgacaacgaaactcacgacgtaatttttgcccgcgtcctcaataccattcccgacaatggtactcctatgacttacgcctactatcaccatgtaattaaaggaaaagctcccaaaaacgcaccgacctacatcaaggaggaaaatgtttccccagaagatccgaaaccaaactctggaaaaaagtacatttgcgaagtatgcggatacattcacgaaggagaattgccagacgatttcaaatgtccggtctgtcaagcaccgaggagttgtttcaaagaaatttgatttactatgaaccaaattcccgatcgaaagttctattttcaatcgggaatttttactgtttcaaaagataggaaccaccgagaacccaatctaattcaccaaacttgctttggcttatagtttacactatctttgcataaaatgcaaaacagacgatattatcttttattagaacttttaatctttacacaatggattttataatcgacaatcatctgcaaggcctcgttattggaatctgcacatttctaatcatcggaatgttccaccccatagtcgtcaaagccgaatactattggagtactcgttgttggtggttatttttatttttggggatagcaggcgtgatatcgtctctatgcatcgaaaatgtagttatatcgtccttgttgggtgtttttgccttttcttctttttggtcgattaaagaaatcttcgaacaagaaaaacgcgtgcaaaagggctggtttcccaaaaatcctaagcggacttacaaattttaaagagcatacccatcatatttaacgccttatcctatacaatactacaaaaaagagctatctttgcaagagatataaatagatgccatactggcataatcgagtgaaacatatcgatttgcaagacattctatttttagatagtgttgttatgaagtatctttacgcagtctttttcgcgttagtattcagtggcttcgtccttccaacggccgtagctcaaacaactatggagaaagagatctggaagatcgacgacaaccgtcaaaatgaacccgtccaagaagcccccatagaggtttcgagcaaggacggaagcatttatattcgtaccccacgcaaagtacaggtaatagtctacacgatattaggacagatcgtaaccgaccggaccatcaatcccggcctctctgaattaaaaataggtgtccgaggtatttatttagttaaaatagagggacaaacacaaaagattgctctttaatatatcctttttacttcaaatcgatattacaaaaataaaaccttaaacattgtttcaatatttcatgaaatagtttaactttgtccctataaagttaaacttaaaaaccgaaacaatggaaagtatcgattggtcaaacctgtcattcggctatatgcctaccgactataatgtacggtgtatttacaaagacgggaaatggggcgacattacagttaccagctcacaaacattcgaaatacacatggcggccacttgccttcattacggacaagaggcattcgaaggaatgaaagcctttcggggtaaagacggaaaaatccgcattttccgtatggacgagaatgcagctcgcttgcaaagttcctgccggggaatcatgatgcccgaactgcccacagagaagtttaacgaagccatactaaccgtagtcaagaagaacgaaaggttcgtacctccctacgaaagcggagcttcactctatatacgcccattactaataggaacatcggcacaggtaggagtcaaaccggccaaagaatatttgttcatcgtcttcgtatctccggtaggtccttatttcaaagagggtttcaaacctacccctatggcgatactccgtcaatacgaccgcgccgctccactcggaacaggacgctacaaagtaggaggaaattacgcagccagtttagtggctggcgaaaaagcccatgaactgggatattccgccgtactctatctggacgccaaagagaaaaaatatatcgacgaatgcggcccggccaacttcttcggcattcggggaaacagctatatcaccccgaaatcgacgtccattctcccttcaatcaccaacaaaagcctcatgcaacttgccgaagacatgggcatgacggtagaagtacgacaaataccggaagatgaaatcgggacattcgacgaagcgggagcttgtggaacagctgccgtcatcagtcctatcgcccgtatagacgacctcgatgaaaacaaatcgtatattttctccaaagacggtaaacccggacctatttgcgaaaagctatacaataagttacgcgctatacaatatggcgacgaacccgatactcacaaatggattactatcgtagaataactacaagattatacaacggcagcccggagagacactctttcgggctgtcgcttttataacacattttttcagtgacaaccatgaatatccaacaaatcttcgaaaaatactatcaacccggaacgcctctttataacagcgtatggtcccatagcaaactggttgccgaaaaagccctgaaactagcccaagcccacccggaattaaatatcgattcggactttgtttacgaagccgccatgcttcacgacatcggtgtatacctcacccatgctccttcgatttactgtacaggagaagagccctatatccgtcacggcattataggagccgagcttcttcgaaacgaaggatatcccaaacacgctctcgtttgtgaacgacacacaggaaccggactgacggtcgatgacatcgtctcccaaaacctcccgcttccacaccgtgacatgtgccctataagtctcgaagaaaaactcgtttgcttcgccgacaagttttattcgaaatctactcccgaccaagaaaaaccgttcgataaagttcgtaaaagcgttgctaaatatggcgatgcgtctctacaccgtttcgacgaaatggccactctgtttttatagaaacctacacaatcaataaaaagaagatactctgaacattgaataaaatatattaaataaagcccaaacgccgataagtcatggaaaatgtgtatttttgcgagttgattacagattgacagccggatgccaaaagacagcaaaaaatacgctatacttttatctcttctatgctcctcactgtttgtgtcgctcatcgcacaagacaggcatccgtcttatagcgaagtgacttcactcgattccaccacgagcaaagatagtgctactttattatcaaataaaccgataacacttttagacagtatttccaaagattcgttacaatcggattcgttaggagtcgattcgcttgccaatgattctgtctcacccaagaaaaagaaagccggtttgacttcggttgtcgattacaaggccaacgattctatcgttttcacccacggtaacgaggtgtacatgtatggaaaaggggtagtacagttcgatggcatggagctcaacgcagatcaaatcgagatgaacatggacagtagcttagtctacgccgtgggtcgtcccgactctgtgggagatatagtgggccgtcccgttttcaaggataaaagcggagagtacgaatcggaaaccatgaattataatttcaagacaaaaaagggatatattaccaatattgtcacccaacaaggcgaaggttacttgacaggcggacaaactaaaaaaatggagaatgacgaattctacatgaaaagcggacgttacacgacatgcgacaatcacgatcacccgcacttttatctgcaattaacccaagcgaaagtccgtcccaaaaagaatatcgtaacggggccggcttatatggtactggccgatgttcctcttcccctcgccattccgttcggctttttccctttcaccgaaaaatattcatcgggtattatcgttcccactttcggagacgaactggcacgaggattttatttgcgtgacggcggttactattttgccatcaacgattacatagaccttgcactgaccggtgaaatttacacaaaaggttcatggggtatcaacgcccgttcggcctatatcaaacgatacaaatattccggtaacttcgatttgagtttcatcacaaccattaccggagataaagggttgccagactattcaaaaatgaagaacttcaaaatagcatggacccatacccaagacactaaaaacaacccgaacatgtcgttatcggcaagcgttaatttcacaaccagcggatatacccgaaacgatttgaacagctattacaattccaacagctttaccgaaaacaccaaaagttctacggtaaacatgacctaccgtattcctaactcgtcatggagtttttcggcaaccgccaatatcactcaacgtacgcaagactcgacactaaatgtttctttccccaatttaaccgtgtcaatggggcaaatttatccattcaaacggaaatcggtcgtgggcaatgaacgttggtatgaaaaaatacaaatgtcgtatagcggtcgtttccaaaactcgattctcaccaagcaagaccagatacttaaatcgaatctgattaaagactggcgaaacggtatgtatcacaacattcccatatcggcgactttcaatgtgttcaaatatctcaacctgactgccagcttcaactttaccgaccgtatgtacaccaacaaagttatgagagaatgggatactcagcagtcaaaaatagttcaagacacaacctacggattttacaacgtatttaattattacggttcgttaagcgcagataccaaactgtacggattctacaaaccgtggaaaatattcggcgacaaagtacaggccatacgacacattttcactccatctatatcgttcagcgccgcccccgatttcagttctccccgatatggtttttggaaaacactttcctacgtaaacgaacgaggagaaacggtgaccgaaaaatattctcctttctcaaacggaatattcggcacagtgtcacaagggaaacaaggaacagtatcgttctcggtatcgaacaatttggaaatgaaagtcaaatcggaccgcgactcgacaggagttcgcaaaatatccctaatcgaaaacctatcggccaatatgagttataatatggctgcagactccatgaaatggagtaacctgaacacctctatactcattaaactaaccaaagggtttaacctacaaatgagtgcgacatgggatacctatacttatcaattggacagttacggaaaccctgtacgagtgaacaaaccccggtggaccgtaggcaagggattaggccgtttgtccagtacaggaacatctttctcctataccttcaacaacgatacttttaaaaagaaggacaagaaaaaaaacgacaacaaacagcctcaaccacaacccaatacactgccacccgacccgaatgaagagccggaagacgatacagcctcggaagaatcggacacacaattcggggccgacggttatgcgatttgggaggtcccgtggagtctatctatcaactattcggtcaattacggatatgggtctttcaacaaaaagaaaatggaatacaacggccggtttacccaaaacctaagtttttcggggaatatcaactttacgaaaaactggtcttttaacttctcggccagctatgatttcgacgctaagaaaatcgcctatatgaactgtaacatcacccgagatttgcattgctggtcgatgagtgccagtttcgtccctgtgggaccttacaaatcatacaatttccacattagcgtgaaatcgtctttattgcaagacctcaaatatgacaaacgaggaaattcttacagccgactcgactggtattaaacccggtcgcatttgtcgcaacccgtaaaaaccaacacatttataagctattttaccaataaccatgcaaaccgacaacgatcttatactcgaccatttgaacgacccgatatttcatctcatcggtgaagttgccgatgagatgaatcgcccgtgtttcgtcatcggaggatatgtacgcgatatttttctggaccgaccgtccaaagacatcgacatcgtaaccttaggcagcggtatagaactcgccgaggctgtaacgaccaaactggggaaacgggcccacctgtcgacatttcggaacttcggaacagcacaagtaaaatacagtgaccagaaagaaaatatagagatagaatttgtcggagctcgaaaagagtcatacagccatgactcgcgtaaaccgatagtcgaagacggaaacctgcaagacgaccagaaccgaagagacttcaccatcaatgctttggctctttgcctgaacaaagagcattggggcatgctcgtagatccattcgacggtatgaacgatctgaaaaagggaattattcgcacccccctcgatcctgacattacattcagcgacgaccccttacgcatgatgcgtgctatcagatttgccactcagctaaatttccacatagagaaagagacattcgcagccatcgaacgaaaccgaaaacgaatcgaaatcatttcgaaagaacgcatcatcgacgaactcggcaaaatcatacgttcggatattccctctcggggatttattttattagacgactgtaaactgctgcctatcatttttcccgaagtcgccgcactcaaaggaacagaaacaatcgaaggacgaggacataaagacaatttttatcattcgctcgccgtcctcgacaatgtggcactgcgcagccgtaacgaatggttacgttgggctgcactactccacgatatcgggaaaccgcgtaccaaacgctatgattcccgcttgggttggacattccacaatcacaatttcataggagaaaaaatgattcccggtattttccgcaaaatgaaactaccgctcaatgagaagatgaaatacgtacagaaactcgtaggattgcacatgagacctatcgtcctcgccgaagaggtcgttaccgactcggccgtaagaagactcttgttcgatgccggcgatgacatagacgatttgatgcttctttgcgaatcggatattacctccaaaaacagagaaaaggtgaaacgattccgcgacaatttcgaattggtgcgaaccaaactgcgagaaatagaagaaaaagacagcatacgcaatatgaagctcccgatacggggagaagaaatcatggaaaccttcgggttaccgccgtcccgtcccgtaggtgaaattttatcggctatcaaagaggccatactcgacggaaaaattcccaatgaatatgaaccggcacgactttttatgctggaaaccgctgcaacaatgaatttatttccgacaaagaaataatataatatcaattttgccgcaaatacaacaccaatagtatacaaacagatacatttttatcatttttattgtaaagtgaaagtttttataagaaaatgctttcattttacatattttgtattatctttgcaacgaaatcaaagagaaagattacatatttatagggactttccaaaactcaaaaaacatacttatcaatgaaaacaacagaagtattgagcgaattaaaacgccgtttccctaacgaaccggagtaccaccaagcagtggaagaagtgttatcgactatcgaagatgtgtataacgaacatcccgaattcgatcgttacaacctgattgaacggttgtgcattcccgatagaatgttttcatttcgggtaacttgggtcgatgacaaaggtcaagtccataccaatatgggatatcgtatccaacacaataacgccatcggtccgtataaaggaggcatccgttttcactcatcggtcaatccttcgatcttgaaattccttgcttttgaacaaaccttcaaaaatgccttgactactttacctatgggcggaggaaaaggcggatcggatttcaaccccaaaggaaaatcggacatggaaatcatgcgattctgccaagcattcgttaccgaactttggcggcatataggcccagataccgacgtacccgccggtgatataggtgtaggcggtcgggaagtaagctacatgtatggtatgtataaaaagctggcccgcgaaaataccgggacattcaccggaaaaggtcttgaattcggaggctcacttattcgcccggaagccacaggatacggaaatgtatatttcctactcgaaatgcttaaaaccagaggaatagatattaaagggaaagtagtcaccgtatcggggtcgggaaatgtcgctcaatatacggtgcaaaaacttatctccctcggagccaaagttgtcaccatgtccgatagcgacggttatatctacgatccagacggaatcgatgaaaagaaactggcttacatcttcgaactgaaaaacctctatcgaggacgcattcgtgaatatgccgaagaatatggctgtaaatatgtagaaggaggacgtccgtggggagaaaaatgcgacatagccatgcctagcgcaacacagaacgagctagatggcgacgatgcccgtaccctgcttgccaacggctgtttcgccgtttcggaaggtgcaaatatgccttctacccccgaagctatcgaacaattcctcgcagacaaaattttatatgctccgggtaaagccgccaatgcaggaggtgtctcggtaagcggattggaaatgacacaaaactcaatgaaaataagctggacagccgaagaggtagaccaaaaactgaaacaaatcatgcacgatattcatgaacagtgtacccgctacggtaaagaaagcgactcttataccaattatgtgaaaggagccaatatcgccgggttcatgaaagtagccaaagcgatgatggcacaagggatattgtaaaataaacacataaaagaggcaaaaaaggaacttatcgtaaagttcctttttttattcgtaaaagaatatagcctaaatgagaagattctcccataaaagactgtcccaactcttattaataagaaatcagagattatcagaacggatatccgatagccaagtggaatgcgagactgtttttgaaagaagtcatattataatatcctttctttccggtatcatagggtgcatgtatcccgatacctaaatctccccgtaaaacaagcataccgatatcgtagcgtaatcctatacctgtaccgagagctatatctttgagaaaagttttccggtcgagttctccaccaggacgtttcggatcttttttcaatagccagatattaccagcatcgacgaatgccgcaccgtgcaaatcgccccaaatgggaaaacggtattcgatattcgcttcgagcttgaaagtacctgtctggtcgaaatatccgtcgacatcgtcttttgccggaatataacttccgggaccgagcgaacgtatagtaaaagcccgtatgctgttcgcacctccgatataaaattgttcgctgtacggaacttctttggaatttccgtatgcatgttccgcacctataaacaaccgggtcgccaaccagtgttcggcacggaaacggtgataatatttcatttcggcacttccctttacgaattgagaaaaactgctgccaaagatatgtttctccccatgctgtccaaaaagcgatgttatcccactaaggatatttccagccgacattcccatgaactgccagataaagcggttatccacttcccggccgtatgaggtgtcgtaagtataggtgtaactcgaagaaggaatgaactgatctcggaaactgagggcaatggccggattctcttccatcgttttatcgaacgattcggtcgtattgagcagttttgtatataccaacttgaatggcgtaacagagtgtccggcccgcaaggaggtacgatagtcgtatgacatcgaaccgttgaaagagaccatacgaaaataatgaggccgattcatcaagtttgcccccaattggaaccgagtataagcgggatattttcgggtacggggtagttgcggtagaaatcccggcacgatacggggataggttaatgacgaattcaaacccacttcgtaagagttgaatagcgaagccttaccatgctgcgagcctccgcctgtctgccactcataactcccgttgagtttgaccgaaagtttttcaccgcccccgaacacgttgttgtgattaataccgaaaataagtccagggcctatatagctgttcgatttagacgaaacattggcttctatggtcgcttcgagtggcacgtcgaacgtcgcctgtatcattacatcgagggaatcttttcgtatcaatgaatcgagaggggttacttcgacagcgacagtacggaatattcctaaccgcccaagattggattgcgtctcattttgggtcgcaatcgaatagatttcgcccggtttgaaggtaatatttttgggcaatacccatttcttcaatcgtataggcttgtaataagcgacagtcatgcgagggtagcgaatggtatcgggagttccgtcgccggtggcacggttgagtcgaactgttacatctcccacataataaggtttgagcgcttgtgccggaatcccttttttcaacgtcattctcaacgccactttacccggagacaacgtagtgtcggcaaggtattcgatgtattcggggcggaaataaaaatatccgttatttctcagtgcggtagtaattcggtttcgctcgaaagataaagaatcgaggcaataacggtcgcccttttgtaaaatcgaagaactatttatactatcgataaaccgagttaccggagtcgtaggagccggtaattctatggtatcgagcgtataggcttcgggaacttcgattcgatatttaatgcgggcttttttagggttccgtttgttgtatatcaattcataatcggctttcgctccgaaatatccgttatttccgagaatgtctttgactaccctcatacgcaattcgggctgtacggtcgaaacaagtaccggctccttggccaacttctcgtatatccagtgcttcacccctttttcccgcttgggttccatgtaattccacacccacaaacctatgggaaacggcgtgcggatataaggagagaacaaaggattgttgggtgcgacggagagagtagatcgaacgtccgatgcagctgcatcggcgattttcacacctgagtcgggtatgatttccattttctttacgccggtatacaatacttcatcatcggcaatacgctttgtcgtggaacagccaatcagtatcagcaatagaaaagcggcggtaaatacatttcggaatacttttttcataggttcaccccctttctgcttttccgtggtcgaaatagctccatcagattgagcagccttttcttaacgacaaaaccgacaccggtttgagtgatctctccttcgagaatactttcatatcccgtatgccggaatattttaatatacatgttatccctttgattcaaataatattcgagggaaatgtcgtctatgaagttctctttgaaattgacatctgcgttgtcgtccgggctgaggcttccgccaatgacgactttcaccctattgttaaacagacttttagccgccctataagaataatcggtgcgagtattcactcccgaagcatcggtgtaggaattaatatcgaaagacaaatcgatacctttcaagttatcctgagcccattggttcaattctttttgcaagaatgcgttaagcggattacccaataaatcggatttcgtagtcgacgttccgggaccggtatatgtattataaatgagcaggctcatggcttgcgaagcccgttgctcggccgtgagcgatgtcaactgattttgcagagtgaggtcttcgggtgcggaaagatcgaaagaaacagacaaattttccaatgaatttttaatgatgatactgatgtcaaaattgacttgccgggtatttttctcctcctcggagatagtcgtgcgtacggtctcgacagctgtaatagacatttgaggatcggcgatatcaccgttccaagacacatagcttccgtcttgaattttaaacaatttttccgatatgataggcgggttgtaacggacgaaacctccggtgagattgtatcgaccggtgaaacggctgtcgcccaacgtattcatggtataggccaattcccctccgccttgaaggtctatccgattttttccgtccaccgaaagattcacacccattttaacagtgggagcaatgttgatattaaccaatatatccatgcccaacacactgctcttttgcaaagtatcttcttcggctatttcagtactgtcgttgaacgaaacgaatgtaacgatattgttctcttgttgttgaagagcgaaaggagaatcttgcataacgtaggttacttccgttcccgtgagcaaccctacatttccccgaattttcagggcatcaagcggaccggttaccgccatgtccatatctgcgataaccgaaccgtaaacagtcgctttcgtacttctcgccgatttaaccggttggaaagccgatgcatataatctcaaatcggtaacgattttatctaattttttgaaatcgatatttccatcgatatgcagtggatttttattcgctcccgtgatctcataattgtcgaattgcaaaacattttgttccactcgaatctgactttgaggaaatttcaaagtggctcccatcgatttagaattagccacagcttcttccatctgtatgtaaccattcagaagaggcgtatcggtactacccgtaattcccattttcccattcaaatatccctgtaattgcgccatttcggaagggaggaacggattggctgtcgccaacgggaactcatctatggacaagtttaaccgaacgggattttctgcttgattgtcaagaagcccattcaacgtcaatactttcttatcgtctatttccaaatcggcttgtgcttcctgacgccccaaagagtctaattgataatcgacgttcagattaaaatttcccacacgttgtttcccataatataaatcactgatccccatactaccggatacttccgtcgcactctgcggaaagtttaccagcaagtcggcagaaatacttccgtcgatttgaggagagaatggcgataaagccaaccacggagctatctccataccgtttatatcgactttcaatgcctcttgatgaaagaaatcatgtaattgttcgttgtgtaaagtcttgataataaaatgccgatcctcgtgagtgagagctatgttggcatcgaaatgtcgcccatagtggtaggcaaaaaaattgtcgggattcaatgtccacgtttcaaagccgataatcggatttttcgggaaaaacgacacttgaatcaatgaatctaagaaatcggcttggcagcctattcggaatccttcttgtccttgtctgtttttttgcacacaaaacaatttagtcgtattcccggaaaggaatccgttaaggattacagaggctaactgatcgaggtttccgggcttgttgccgacttgaagagagtaatataatctttcctccttttcacgacgctcgaataaagagagttggagggtatcgatagtaatccccccggtcgaaaagcggtctatcttacccgtcgtattcaatagagtatcgttttggatattcaagtcgatttgagaaaatcccatgttcattcctttgagatactgctgtatgagattattccgctttgcgttcgcatgaaactcaaaaggaggcagaacttgatgcaacgctttcatatccaatcgcttttcttcttgaaccgtagcaataataggtaacgactggttcagcttttccaagaaagagctaaatcctatactcgaaacaaaattcatagccatgtctccgcttcggacagcggcatttatgtgcgtagagtctgtttcagccgaaatcgacaatgcattggtttgtaacctgctggtcggcaagagggcagaaaagtcacttaaccgtatgtctgcccgataagattcgctcatgggcgaaacatagccagaaagagaaaggccggtagaaaccgagcatgcttcggttaccagtttcagagcttccaaatcggtatgaatctcgccagtcaagtcggccgtatattcttcgggagacagcgatcccgatacggagagtcctatcaacaaattaggatcggtacaagttataccgccactcattttacccctattcaattttgcttcgatagacagtccggtataccggtaacccgaataatccacggaatctattttcaagtcgacagtcgcatacatactggaatccatcggattgtatttttctcctgagaaccgggtcgaagcagagagtactcccaaagaatcatgaggcaggaacgaagatagagggaatcgatctatcagtatccgtccatcatattgctcttttttagtatttaatcgagcaaggagagtgatgaggccatcgccggattcgatttgggctttcgaccggatcatctccggtgaaagtcgggcattaccggtgaatcgggtcggcggtatatgtatttttttgcttagggagtccggcattacattcgcaaagaccggcgaatttttcaggcgcagctcccattggagacttccgttaatccgatctgcttcgtgcaaattttgcacattgcctgtcgcttggcaaacgaatgttcccggcagggatatatcggccttttccaaatttaaatctcccaatttaccgttcaccgagatgtttgaaagaaaaccggtcgacaacaacaaccctctggtataattgtcgtattcgggtaatacccgaataatgtccccaatagcgagcttagcctgtaatcgagcttcgaccggtgtctgtgaattttgtgtgaaaataccgtttccagctttaatctgcgccgaaatctcggataaagcagtgttcatctgaaatttttgcaaggagatacctgtcgaatccatagtaaaagttccttgtgttcgagttacggctatccccgaacgttcggtgaacgccaattgtttgataggaacgcatatttcgcttcctcgattatagagagagtcgatggcaatctcaatattatcgagagaaagatacccgaagtcaagccctttttgggggattcgggtcggcaaggcataaagagcatgattccgatgcagccgcaacttttgaatttgtacggtccacggcggcgaaacgattgtatcggcatcattttcctccggttctgcttcattatttccactccccggataataacgataatctcctttgtctataatcgcctcggagactcgaaccgattgcccgtataaatctatttctccttgcaagagtctcgctttttgtatcgaagcatccaaattttcgatagtaggtttcatctgcatagaataatggatattcgataaccctatttctcctaccgagatgctccaattcaatggagcgctttccgcagaaacagtatcaggggaactctccgacaagttcaaagttatttcccctccgtccaatcgggtagaaggtaatgagatgtggaaatcttttaaattaacgtttgctttctgtgtggagaattgttttatgttagccgatagtaataaagtagagtctgaattcgaaaaacgaaaaagtgtttcgttcaatgctattttctggatttgaacttgtccacgcaaaagtgccgccggggctacccctacttgtatacttgaactttgcaacagcgtatcccgactcgaagtcagtaaaagtatatcgtcgatttgcagtcggaacgggaatttaagagacaactttcctatggaaagctccattcctgtcgatcggccgacataaccgctaatctcattctttccccatcgttgtactgccgggatataaatagacaaaggtaaagtcaacaatagcactaaaagtgaaatcaatacgatagcaatatattttagtgcttttttcattttggaggaattcttttttgaaggactctatatacaccttatttaactgtattccggtggctattttataaacattggcacgacagaatttgtttttagaatatacagaaaacctaaaaaacaaggtaaatatatgaaaaattatttgtacctcattgctttatttacaatgatcgcgttaggaataaattcggggcatggccgaatcagaaagccgatcaacgaccggaataccccattcctataccgatgagtttatcgtaacgtactccctgcggccgatgataaacctttactaaatattcgtttaccgtttcataatagtttccttcgatagggcctgccgaagcggtactccctccatcgggcaaaaataggtattgataattgtaagaaccctgtttcaagagcagggttttctcatatttcccagaagcaggattataaaccatttcgttataaggggtataccgatgattcgtcatttcgccatcgatatatatttttcctcccggaatcggatcggaatcaagcgtgaaatgcacgacgaaataatcggcttcggtattgctgtcgtctgccccgctttggcgtatgacgaaacgcccgttttgggttttatcataaagataactcgtttgcgctctgggaacagacgtagctaacacgacgtgataatatgggtcgaaatagtatattttttcaacccctaatccggcataacgggtagctaccatttcgaaccgacgaaattcattccccgcttcgaatatcatattgcggtcatgaccgaaaacaatttgattcccttgtacccttaaaggtctatttataataacctccttatcccgtcggctattttgaagaatacttattttcaattcgttataaggattttgaacccgataattgttggtattgagagcgacttctacctgttgatgttcacggttataatctatatcggtgcgagacgttacagaaggagcaaccaaaacttggttttcgtagaccgaaaaacacacttgcaacaaaatattttccggttcgttttcaggataaaccacaagcacataattacccgatactttaaactgtacatcggcattaggaagcgtaatcctgtaatgcacataatgcgcgaaagtcgcagtagaaaattcatattcttcgacagaattcgtattgaagccatcgagatattccaaatccgacaagtcggaaggacgccaatctgcattacaatgtataagactgtattgcagataagtgacatcttcggccaactcatcgaacgaaatcgttatgtgttcgtcggtattcaattcaataatgggagggaacaattccctaccttccacctcggtctgtatagttcgaaatcgatcggagaaggcttgtgtttcatacggttccgaacgattttgggccgttgcagaaatgcctcccaaaaggacacaaacagaaataagcaattgaaaaatataacttgttttcataaccattccattatcgagttactgatgcaaacatacgaaattttacgcctatatcctaatatatcccttacagccatcaattctatcgcaatagaatgaaaataatttataactcgaatcatacagaatgccgttcggcatgaaaaataaatatatttattttatcctacatctacctttcgttatattattctgtataatataggattcgtttcggcatagtcaagccgaaaatataattttcgcttgtctctgcactctcctttcactatatttgtaccgtattttaaaatatagttgtgtatgaattgtaagtttttcactatcgcttgtgctttattgtcaatgtctttctgctcatgggcaaacgaaaataaaacggattctgtgggttaccaatttactgtaaccaaagaattgaagaccaacccggtaaaagaccaaagcagatcgggaacgtgttggagcttctcgactttatcgtttatcgaagatgatttgttgcgtcaaggaaagcctgcggtagacttatcggaaatgtttatcgtgcgtaacgattatatagaaaaagcgattaaatatgtacgcatgcacggcgatatcgccttttcggccgggggtagcgcttatgacgtgctctatatcatcgataaatatggcattgttcccgagaagtttacttacaacggcgtagaatacacccctcaatcttttgcaaaatcattgggtataaaagcctcggattatgttccgttgacatcattcacccatcacgatttttacaaaccttttgccattgaagtacccgacaactggttatggtcggaatattataatatcccgctcaacgaattgatggagacaatcgattatgccatcgataaaggttttacagtcatgtgggcttccgatgtaagcgagaaaggattccaatatctgaaagggtttgctgtggttcccgtagagaagaaaaacgagaacctgtctggaaccgaattggctcgttgggtaaaattgtcaaaatcggaaaaagaaggagaactatataaattcgaagaaccggaagaagaacaatacatcgaccaaaaacttcgacaagaagcattcgataactacgagactaccgacgaccacggcatggtattcgtaggaacagccgtcgaccagaacggtacgaaatattataaagtgaaaaattcatggggtacggaacaaatttatggaggctttttctacgcatcagaagcattcgtgaaatataaaactatggatatcttggtccacaaagatgctgttcccgtaaagattctgaaaaaattacatctgaaatagcacgatgaaacggcttcgtctatctggacttttgctgttgatattgtgtttgtctctattggctatcccgttttggaacgaccgaatcgtacgccgttatatcgacaaaatatggttacaccggacgaactcgatcgagaagttgcacgagtttgaacaggagtataaaaattttgagtgcgacgtgctgttcctcaccgattcagcgacattcgagatagggcatgacgaaccttcgggcgaaccgttgaagccctatctcgactttttaggagctaaccccgaccgagaactttggctcgatttaaagaatctgaacgaaagtaactgcatacaagccgaaacgacacttaccggactactggcacagagagatgtcgataaagatcaattgattatcgaatctcgtgattggaaagcgttacatcattttacacaagaagggtattacacttcttgctatctggatattccccatatagacgaattgtccgacgcagaacgtttacacagactggattccattcaacaaatagcccatagcggagctgtttcggcgctctcctttccggcttcgtattacgcttttctaaggaatctggatttctcggtagatttactcacttgggaacatcgtcgatgggcttggcaattacccttcttttcccgatcaagggcgattctgaaagacgggagagtaaaagtcgttttggtgaaagaaaagggacattatcacaaatgaatctttttataaaaataggtcaaacacaatcgatatacccacgcaacaacgatacaaagcacgagatacaataacccggatatctctgggggaagggcttgatcgtgcgcaagaacttgttgccgcacaaaagcatgagttacaaacagcgcagccgaaagttttcccatgaaaagcagaacgttttgaagaggttcctttctggcaagcgggagaacggcagccacaggaaagagggctaatataggactaatcacccataaatagcgattgaataaactcagaacgaaaagaacgactcccaatgaaatccatctccacgaaatatgtacagggtgacgagacaggagaatgcctacacaaaacaccggtaaccaccctatgctgttataacgaaaagcaaaaacccagttatccaacccgagactagacaacacaatgagcaacgtccacacccctgctataataccccatagaaccttgtccgatgatttccgcaagaataatgcgtaaataacatacaactgaaatgccatgccgaaataccaccacggcccggcaatgataaatctgtcggcaaggccgttggccgtaaaagtaagcataaacaacatgtcggtccaaatcttgttattacccagataggcataggtaaaatgcgtatgccccgaataacggtcgaggataagcagtagcgccataggaacgagccatttccacagttgtatggctcggcgcaaaatgatataccatttcgattccccgctgtggtcataacgtttggaaagtccataaccactgacaaagacaaaaatcgaaactccgtaatgtcctaaaaaggaaaatagtgataaaattataatgcgtaaattaccagacaacatggcctcggtaaaacgggaaacattttcgggagcatacttaaactcacattctggcggaaactcaggaaacgtatgaaaataattatgtaatataatcaataaaataccaataccttttacaatatccagatttttatcccgcgtaaatgttcgtaaattacccccccccaaatattcacattcattagcattatttatattcatttacattcatcagatacaaaataacatgagattacatttcttctgatacctcattgagcttttcaccgatcaatcgagcagccgatgctacataatcggcacaagggcgacgcttgtaatacgtttcggtacgagcctcgggagtaggactatcgcttttatggtcgagtcccaacagctctctgcaaataatagaaccgtttagggccttcgatttctctgccaaatcctgcaccgtgctgtaaacgatttttcgtttagtcatatccgagggaacatcatttttgtaaaataacccagcaaccataaacatgccgctaactgcaccgcacacttctctcaatcgtcccatacctccacccaacggggcactgatagacgctgccaaagacgggcttatatcgaacaaatcgcaataagccaacacaacggcttgcgcacaattatatccttccagaaaaaaccgacgagccttttccgctctttgttctacatctactctttccataccgctaccatcgaataggttcgattccgtgagcctctaaatattggttagtttgactgaaatgatgattcccgaagaacccccgatgtgccgacaaaggcgaagggtgtggagattgcaaaacaagatgccgactgcgatctataaaatcgcccttccgttgggcatacgatccccataggataaataccaaatgctcccgctcttctgccaatttatgaataactgcatcggtaaatgtttcccagcctctaccttgatgtgatgccgctctgtgagcctcaaccgtgagagtagcattcaaaagcaaaactccttgttgcgcccatcgagtcaaatttccactccgaggaacaggaattcctaaatcgctctcgatctccttgaaaatattttgaagcgaaggaggaaaaggaatatggtcattaaccgaaaaacaaagcccatgtgcttgacgaggctcatgatagggatcttgccccaaaataacgacctttacttggtcgaacgggcaggcgtcgaaagccgcaaaaatctgactaccgggaggataaaccgttttagtagcatattcgtgccgtacaaaagccgtcagattttcaaaataaggcttgtcaaattcgctttgtaagcgttgctgccaggtggattcgatacgaacattcataatagtcgaataagattttaactatatctgtttgcaaagctacaaatatttcttacttttgccacgcaaatgaagaattgtttctcatttttgagtagaaacaatctagcttttttatatcggcacccgtagttcaatggatagaataaaggattccggttccttcgattggggttcgactccccacgggtgtacaacgcaaacagcctatctgtaacagataggctgtttgttttatcgaaaatacataagattacccagaattattttgattgtgttttttaacccctccgtcctacggacacctcccctatattttgctgaacaaaacacaggggaggaggttgaatacccttttatcgcattatttatcgaatgagatggatcgtgttcgtccttctcccctgccgtgtcgtagcattacagggtgtcacgttagccatatagaagagatatccgcaggacggaggaagttgaaaagattatataatctttgatggagggatcagacgcataaacggacaatcttcattaatttcctactgagccgatatccccactaaatatcgacaagcctaacttttttcttttatattcaccttctttctgtttttattcatctgaattttgtagtttgaaaccgactatgattcgatacgaaaaatagacaagctcattttgtccttctctcggcttacactatctttgcactatggaaaataaaatagattggagccgtacagatggattaattttcgatatggacggaaccctgtgggatgcagtagacacatatgcccgcatttggaacgaagtatttctgcgagcaggaaaagaagttcacatcacgagggaaagcctcatcggtaacatcggtattcctattcctaagattttggcaaacctctttccagaaatcaaaaacgaagaggcaaaccgtttctcaaaagagttagcgaaacatgaacccgaattattgtcccgttacggcggtacaccctatcccggcgtggtttctggattggaacaactctcctcgaaatacaaattgtttttagtcagtaattgcgacacccatactttacctattttcatgtcttgtatcgggataacccctttcatcaccgaggccatttcattcggcgacacacataaacccaagggtgacaacatgttattactgaaagaaaaatatcatctgcaacaccccctctatatgggcgatatagaagccgacgggcgggaaactcatcgggcaggactaccgttcgtatatgcccgttacggattcggacacactgatgattatgaattagcattcgattcgttcgaagattttaccaatttcttcttaaaacttaaataaaaatgtattcgagtaattttcaacccgagtcttcgttacggtggaagagagtacagtcggtattacagtcgataaatgccgatgccgttttgttgaatacgaacgccaatctatactattcttcgggccgggtattcaacggttatacctatataccttcggagggtgaagcgatttatttcgttcgccgtcccatagggttgaaaggagaaaatgttcattatatccataaacccgaacaaattccggctttactcaccgaaataggactaccacttccccgcaaactcgcaatcgagtgggatgcatctcacggcgatttcacacggttatccgccgtatttcccgatgcagaaataacgaacggctcggctgtcatgcggaaagttcgttcggtaaaaaccgattacgaattggggttattgcacgagtccgccgtgaaacatgccgaagtatatcatcgtatcgaatcggtctatcataacggaatgaccgatatcgaattacagatagaaatagaacgcttgttgcggttgcacggaaatctggggcttttcagaataaatggacaaagcatggagattttcatgggcaatgtcatttgcggcgataatgcagatactcccacaccgtacgattttgctatgggaggagccggattgagttgctcgataccggtaggttgcaatggttcgctcattcgtccgggcatggctgtgatgatagacatgtgtggcaatttcaccggatacatgactgacatgacccgagtctattcggtgggggaattacccgacctagctcatcgagcccaccaatgttccatcgatattcatcgtgctgtaagccaaatgggtaaaccgagcgtaaaggcggccgacttatataatctagcgatttcgatagcaaaagaggccggattggaaaattactttatgggacatacccagaaggccggatttatcggacacggtgtaggtatcgaagtcaacgaagctccggtcttagctccgcgctcgaaagatattttagaagggaatcaagtcatagctcttgaaccgaaatttgtcataccccatgtaggcgctgttggaatcgaagatacctatacggtcacacccgaaggcatgaaggccattacgaacgctccgatagaaatagtatctttatcgtaaaatatctttttgaacccttccgtcatttcatgacacctcccctatcgcacttatagtgcgtagtggagaaggttaaaatgcattatccgttatccccgctctataaaaataggaacgagggtaaaggataaagatgtaaccccgccgattttctatcgttgtgcccttttttctctgcgaataacttcgtaactttaagcccctgaaactaaattttatctgtttatgcaaccctttattcatctgcacgttcactcccaatattctattcttgacggtcaggcttcgattccggcattggtcgataaggctatacgcgacggaatgaaaggtttggcattgaccgaccacggtaatatgttcgggataaaagagtttttcaatctggtaaaaaagaaaaacggagcaacaaaagatgccattaaaggtgtacagaaacgaatcgaagccatcgaaagcggtgcggaagaggtagaagacaaagaaaaagaattggcctccctgcaagaagaaaaggcaaaactcgaagccaaaatattcaagccgatattcgggtgtgaaatgtacgtagcccgtcgccggcttaccgacaaggaagccacaccgagggaaatacgtactaccgtagttaacgaggtcgagggcttttctattcgtcggggagccgtcgacgagggtggttaccacttggttgtccttgcaaagaacctgaaaggttatcacaatctggtcaaattggtatcgaaaggctggaccgacggattttattcccgtccccgtaccgacaaatacgaactcgaaaaatatcacgaagggctgattgtttgctctgcatgtctgggtggagagattccgagaagaatccttaccggcgatattcaaggagccgaggaggctatcctatggttcaagaatatcttcggagaagattattacctcgaattacaacgccacaaagctaccgtaccgagagccaaccacgaaacatatccgctgcaacaagtagtgaacgatcggctgatagagttctctcgcaagcatggaatcaaactggtatgtaccaacgacgttcatttcgtggaagaagaaaatgcagaagcacacgaccgcctcatttgtttgagtacgggtaaagatttggacgaccccaatcgcatgctatataccaaacaagagtggttaaagacccaacaggagatgaacgacatcttctccgatgtgcccgaggctctatccaatacgttggaaattctcgataaggtagagttttattccatcgaccacccgcctttgatgcccactttcccgattcccgaaaacttcggtacagaagaagagtatcggaaaaaatttaccgaagaagatttattcaacgaattcactcgggacgaaaacgggaatgtcgttttggacgaagccgcagcacacaagaaaatagaaaatttgggcggttacgacaaactgtatcgtatcaagttggaagccgattacctgaaagaattgactttcaaaggagcgcacgaacgatacggagaggaactatccgacgaaattatggagcgaatcactttcgaacttcatatcatgaaaacgatgggttttccgggttacttcctcattgtacaggatttcatcaatgcagcccgcagagaactcgatgtctcggtcggtccaggacgtggttcagccgccggttcagttgtcgcttattgtttgaaaattacgcagatagaccctctgaaatacgatttgctattcgaacgcttccttaatcccgaccgtatttccttgcccgatatcgatgtggacttcgacgacgacggtcgtgggcgggtattgcaatgggtaactgaaaaatacggagccgaaaaagtggcgcatatcatcacctatggtacgatggctacaaaattggcgattaaagatgtagcccgtgtccaaaaactaccgttgcccgaatcggatcgtttgactcgcttgattcccgaccgtttacccgaaaagaacgggaaagcccagaaaataaacctgaaaaattgcatcgagaacgtgaaagaattgcaggaggcttgcaattcgagtaacgaactattggccaatacgatgaagtatgcccaaatgctcgaaggaaacgtgcgtaataccggcgttcatgcctgtggcgttatcatcgggcgtgacgatataaccgattgggttccggtgagtacggccgacgataaagagaccggagagaaaatgctcgttacccaatatgaaggcagcgttatagaagataccggcttgataaaaatggactttttgggattaaaaacactatccattatcaaagaagccgtcgagaatattcgccaaactcgtcacatagacctcgatatcgactctattcctatcgacgaccccaagacgtacgaattatacagtgccggacggacgaccggaacattccagttcgagtccgccggtatgcaaaaatatctgagggaactgcatcccacgacgttcgaagacctcatcgccatgaacgctctttatcgtccgggacctatggaatacataccgcaattcatcgcccgcaagcatgggaaagaacctatcgtgtacgatattcctatcatggaaaagtatctaaaagatacttacggaattacggtatatcaagagcaggtcatgttgctctcccgtttgctcgccaatttcacacgcggtcaatccgacggattgcgtaaagcgatgggtaaaaaactgaaagataaactggatgcgttgaagccccttttcatttcgggcggcgagaaaaacggacataaaaaagaagtactcgaaaaaatatgggccgactgggagaaattcgcttcctatgctttcaataaaagccatgccacatgctactcatgggtagcgttccaaacggcatatctgaaagccaactatccatctgaatatatggcggcagtgttgagtcgaaacctcaataacatcacggaaatcacgaaattcatggacgagtgcaaatccatgaagattcaagttttaggtcccgatgtcaacgaaagccagtataagttctcggtaaacaagaaagggaatatccgtttcggattaggagcaatcaagggagtcggcgactcggcggtacaagccattgtcaaagagcgcgaagccaacggcccgtataagggaatattcgactttgtggaacgagtcaatctttcggcttgtggtaaaaaaacgatagagtcattggctatatccggagccttcgattcattcaaagaaattcatcgggaagatttcactgcattgaacagcaaaggagaaattttcttagaaacattggtacgttacggtgtaaaagtacaaaacgacaaaatgtcccaagctacgtctttattcggaagcgtagctcccatcgtaacgaccccgcccgaaatcccacggggcgtgcctctctccgacatcgagcgtttggacaaggaaagagagctcgttggcatgtacctctcggcacacccgctcgatgcctataaattggaattattgtacggctgcaatacccgcatgaccgatttgaaagaccgagaatccctcttaaataaagagttgacattcggaggagtggttgtcgactaccgaacgggaatcgggaaaagaggcggccaatatggcttccttaaaatagaagactattcgggagccgaagatatacctttattcggccaagacttcatagactacggaaagtatggagccaataacggaactttcgtgtggataagggcacgctgtcaaccatcgaaattcacccccggccgtatcgatttgaaaattttggagataaagctactatccgaattaaaaggtactttacttaattccatcacaatcgagctaccggcccgattggtaaaaaacggattcatacagacactttccgaatttatgcccccggcacaccagcacaaggcagaattgagtttcaaaatatacgactcggagttggataaatcggtacggctgagatcgaggcgcaaaccgacgataacggaagaactcatcgattttttaagcgagaacgacgaggtctctttcaaaataaatgaataatcgtttgcgactcaaccagagattacctacttttgttgtaaaataaattgaaacaataaaacagtaaaaaataaaattatggcattgaaaatcaatgatgaaaatgcaaaagaattgattgcctccggcaaaccggtagttatcgatttttgggcggaatggtgcggcccttgtcgcgcaatcgcaccttcggtagacgaacttgcagaagaatatgaaggcaaagtgataatcgggaaatacaatgttgacgatgacgccgatttaagtgcagaatacagtattcgcaatatccccaccttgctctttttcaaagagggtaaactagtggacaaacatgtcggttctgcttcgaaagccgatttggaagctaaaatcaaagcactgctgtaaaaaatccgaaaaggaaatcgcataaaccccttgcctatatgaatacaaggcgaggggtttctttgtcttggaatagagaatagttctttaccagttaagatactctttcaaagtatttacataagcttcgaaagcctcccttcctttttcggttatttggcacgatgtccttgttttcttaccgacaaattctttcctgacccgaatatattcggctgccgataatttatctatctgcacactcaggtttccggaagtcgacccggtcttttctttcagataaacaaaatccgcctcatctaccgacaagagaatcgacatgacagccaacctcaactgcgagtgtaacaatggatctaattctttcaacatatctttttacactttgcattaagaatatgtcccggaacaatcatcacgacgacaaacgatcccccgaaatagagctgccacaccataggcgtatgtaaagaaggcatagtcataaacatataaatagccgtgacaagcgcgagcaacgggaaataagtaaggctggattccttgataaccagaccggtaatcgacgtacccataccacaatacaacaaagccaacggcatcatcaacccgaaattgacacgaccgataacaaaccccaatacgatcatcgtcaagacagtaagtacaaacaatgctcctatgactctccatgtttcgttgatcatgcggtcggtataagtcactactttcggcctatttcttttctcccgtacgctactgacaagaaatggcaaaaacatcaagaaccacccggcactccacgcactgtttcccgtaaagtaaaccaaagcatagataacgatcgacagaatagcagccgtatagccatacatcaaaaatttatttccacagccactcccgatgctttgttttgtaactcgaatcatctgagcgatgagttccaaactctctttctcattcattttctgttcttccataagtcgatttttagatttacaaattggtttattttataaactatatagctatatactctcttttcatgctataattacagcacaaatataaatcggtttatattataaaccaaataattttctaaaaaatttttattatgatatatttttcattggcaagagagacaacagaccttctctgttatacaattttccatactctaatagataagagaagaaaagagatttcgctcttttcaactaaaacattttacaaatccagcttgtacaaaacatttctttcatctcgatttataagtaaaggagaaactaaaacagttctgtcgataattaatggataatcttttcaaccccctccgtcacttcgtgacacctccctaatatgactaacgccacaccccgtaatgctacgattcgataaataatgcgatagaagggcagtaagccttctcccttatgttttgccttgcaaaacataagggaagtgacacaaatgaatagagggttatttaaactcctcccctgtattttgttcagcaaaatataggggaggcgtcacaacgtgacggaggggttaaaaaacacaatcaaaataattctgggtaatcttttcaacctctctcctcaggaactactgttccttcggtctctcccctattgctaacgcagcacgaacagaggaggaggttgaatacttctttatcttaccggcaaaaattacatgataaaagaatgtcgcaaaactcctccctgccgtgtcccgtggcattacggggtgtttccgaagaaatataccgtagggtgagggagattaatccttacagtcaaaaaatcctatatactatcttttttaaccactctcctcgtcgctaccgctcctccgtttctctcatatggctccgcaacacaagtgatgtatagaaatttaagcaagaatcaacccttcaccgaaatgtccggaatatgtttatcgacaagagactcatcgctaaaattcaagttttccctttacgaattttttactaaatcactaaaccaccgactctatttcataaaaaaggcgattcctttgcaggaaccgccttcattgttactaacacaaaaagaatattaaagtcctttcccgtgacaatttttatatttcttaccgctaccgcaaggacaaggatcgttacgccccacacgtggtgcagccttaatcggctcggtgacccggggctgttgaggagcagccgcagcggcagcctgtgccgactgaccgggataatcgtctttttgagtacgatacttgctgtaatcttcccttcgttcgggagctgcttcacgcacatcttgcggttcctgaatataaatctgtccccgcatgagaacagcgatggctttccggttcatcgtctcgaccatctctttgaagagattgaacgattcgagtttataaatcaacagcgggtctttctgttcgtagctggcattttgcacagattgacgcaattggtcgagctcacgaagatgctccttccaagcctcgtcgatcgtcataagcagcacagctttctggaattgcttaacgaccgattgcgattcgctcttataggcttcgtttatatcgcaagcgataccgaatacacgcttgccatcggtaatgggcactcgtatcatacccgtggatagtccccgttgttccacaaacggttttatattcatgtgagcaatctcggccatacggtcgcctttgcgcttaaaggtagcgacaacggcctcataaaggctgtcgatcacttcgctctttttcatggagcggaatttctcctcatcgaaaggcatttccacggcaaaaatcttgaacatctccatcgacaagtcttcgtaatcgctcgtaccgtcataggtatcggccaaagactctatcgtgtcatagaacatattcataatatcgatgccgatacgttctcccatcaaagcatggtgacgcttggtataaatcacattacgctgtgcattcatcacatcgtcgtattcgagcaatcgcttacggattccgaagttattctcctctacccggcgttgggcattctcgatggacttggaaaccatattgtgttcgatcatctcgtcttctttaagacccaggcggtcgagcattttcactacccgatcggtagcgaacagacgcataaccgtatcttcgaacgaaacgaagaacaccgaagaaccggggtctccctgacgaccggcacgaccacgcaactgacggtctacacgacgggattcgtgacgctcggttccgataatcgccaaacctccggcttcacgcacggccggcgagagcttgatatcggttccacgaccggccatgttggtagcgatcgtgaccgtacctgtttgtccggcttgtgccacgatctcggcctcgcgttggtgcaacttggcgttcaatacattgtgtttaatcttacgcaaagtcaacatacggctcaacaattccgatatttcgaccgaagtcgtacctaccaatacaggacgacctgcttctaccattttcacgatttcttcgatgacggcgttgtatttcgcccgtttggttttatatacccggtcgttcatatcgatacgagctaccggcttattggtaggaatcgtcacgacatcgagcttataaatatcccagaactccccggcttcggtctcggcagtaccggtcataccggccaacttgtgatacatacggaaatagttctgcaatgtaatcgtcgcaaaagtctgcgtagcagcctctaccttaacgtgctctttcgcctcgatagcttggtgcaaaccatcggagtagcggcggccttccatgatacgccccgtttgctcatcgacgattttcactttattgtcgattaccacatattggtcgtttaattcgaaaagggtatatgcctttaacagctgattcaccgtatgaacccgttcggccttgatcgcgtaatcttgcaagattccgtcttttttggcttgtttttcttcgggagaaagtccttgattttcaaggtcggaaagcagctcgctgatattcggcaatacgaagaaattaggatcgtccgatttcccggtcatcacatcgagacctttgtcggtcatatcgataccgttattcttttcatcgattacaaaatagaggtcgtccgtaatctcaggcatacgacggttgttatctgccatatagatagcctcggtttcgagcaacaaaggtttaatacccggttcgctcaaatatttgataagcgccccgttcttaggtaatcctttgaaacaacgatacaacagtacggctccttcctcacgaatctttttatcatcagaagctatcttaatcttggcttcggccaacaacttcgtaaccaagtttcgctgcatcttcaccaattcttccactttgggctggaactgctcgaacatctggtcatcgcctttgggggtaggaccggatataatcaacggcgtacgtgcatcatcaatcaacacagagtcgacctcatcgacaatcgcatagttgtgcatgcgctgtaccaagtcgagcggagagctggccatattgtcacgcaagtagtcgaaaccgaattcgttgttcgtaccgaatgtaatatcggcgttatatgcattacgacgggcttcggagttcggctcgtgcttgtcgatacaatccaccgacaaaccgtggaacatataaagaggccccatccactcggagtcacgtttcgaaaggtagtcgttcacggttaccacatgtacgccattgcccgacaaagcattcaagaatacagggagcgtagcgaccagagtcttaccctcaccggtagccatctcggcgattttacccttatgcaacacgacaccgccgatcagctgcacatcgtagtgtaccatgtcccaaacgacctcgttaccaccggccatccagtgattggcataaatagctttgtcgccttcgatatgtataaaatcatggtctaccgccaagctccggtcaaaatcatttgccgtaacctcgacagtttcattttggctgaatcgacgcgccgtctctttcatcacggcgaaaacttcgggaagcgattcgtcgagaacatcttctatttttttcaatatctctttctcgattttatcgatttcttcccatgtagactcgcgtttatcgtaatcgagcgtttctacatgctctttcagttcggcgatacgtttacggtcatcggccaccgaatcctgaatatgttgtttcaccacatcgatacggtgacgcaactcatcgttcgacaatttttcaagttcgggcgaaatagcctttattttctgaatgtaaggctctatttcttttaaatcgcgctgcgacttattaccgaacagcttttttaataaatcattaaatcccatataaagtatttgttttattcgttaaaaattacctataaggcaaaggtataacataccctgcaaaaatagtgcaaattttgctaactccgcaaaaaggaatgaattagtattgtatttcgggaagcggagcatcggccgaaccattcggcgaacgaatccgcaaaaggcgagaaacggtaggagcgatggccgtcgcacgcaccggagaagtgatacgtaccggcttcacatcgtgtgccaaaataaaacacggtgcaggaacagcattgacacgaacatattcgcgggtatcgttcgcatcctcatagacgacctcccaaccgggacacaaatccagcacgagatcacccgacagtttgggataatagccgtttcgcatggcggcgacacgatcggttccattactcagcaacagacgttgcgatgtataaacgtcttgtacccccgtcatctgaatcagaaacgaagctgcccgattacgcatttcatcggcatcgatatcacgctccttaatcagtttccggttcaagaaaatctgtcgattctggtaacctatcacccaatctccttggccgtaaagagccatcagataaacattcagcaatgagactgcacgccggggataaaattctcccgaaggtatattataaatgggcgactctttcgcctcccccttgaaatatcccgtagaggtcaaaaaaacgaccgtgttggcaagacccactttcttgtctatttcatcgagcagacgggctatatccctatccagtcgcacataagtatcctgcaactccaagccgtagtcctgtatggtcttgttcagatacacgccggccgtataaccgacattcagcatatcgaggacaccacggcgtcccaaaagtcctttatccaagaactccacggcaacatcggtaatctcctgattaaccaaagccgtcgtcttaaactgcacgaacttatcacggccgtctcgggcaaaagttcgtttaaaagaaaaatcattcgtcagatacggtatggccgtataacggtcgggcgtataaaccggagtccaagaaagcgtatcgatacgagccgataaagaacgcacataattgaattgttcgacataagcgggaacatcacgataataagtggtcgtcgcccacttgccattcctatcgttaatccagaaagcgcaattagccgcatgtcccgcactgataatagactgctgtgcatcgggcgctaccgcatacacgcgtcccaatcctccgctcacgatttttacctcgtcgctgagcgtcgaagtacgaatacgttcaggtgaaaaagtttcatcggtataattccctatcttggacgggtcgttcagaataaactcttcccgcagaaatgccgtattgaaaaaacgctccgacggaatgccatgaaaaaacggagttgttcccgtatacagagtagccgttgccgaagccttatcgatattcgggaaatcgaaaaccaaattttcacagacaactccctctcgcatcaaccgtttaaaacccttttccccgaaaaggtgttgcaaggcttccaaataatcggtacgcagttgatcgaccgtaatacccaccaccaaacgaggactgttgtcggcagactgcaccaacggtacgaccagcagagaaaagagaattgtcgctaatactttatttttcatctttgtttttctccgtttttttcaaacgaacggataccgccaaataggtaaacgaacgaattaccaataccaacactaacggaaaaaatgcggcattaaactgttgtggaatccagtgccaaagggccacaaataacaacaaccctgcaaagttagcaaaatgatagtatctaacgatacttttaagagatttaaaccaaataaaaagagccatcaacagccaaaagggatgcaaccaaaacgctgaatagttgggataagtcgccgggtgaacagaaacgaacataaggaaaaacacgactaagccgctcaatccgtaaatcgaaaacaagactgtatcgaatacccgggaatacctttttcgggaaatatcatataccgacacagccgcgacaaagaagaaaaacaaccatgcgacgaaaaggggcgtcaaataaaatggtgtttcgggaggacacgccggaacctcaggatcgtacagcacctccgttcggctcaccaacgggacagccgccgagtcgggactcatttgaacgaccgcctcggaaaaagctttctctaatatttcgggaccgaacatttgttcccgataagtcatcggcctatccaaaccgcttcccaatgccaagtcgataccgaaaatcaaccacgggcaaatacccgcatatcggtctatctcctcgcgaaaagtaggcaaagactcccccggctctttatatcgcaccttgttatccaataccatctctaccatattacgaggacgggtagcacaattatcgaacaggaaattataccggtaaacccggttctgaggcatggcattaaccaacagagcctcgaataaggctctgctttgtatgggtgtcaagttcaacacctgttcatcgaccttcgattcccgaaactgataatttaataagaaatcgggaaaatcgtttattcctaaacaataatcggtttcacctttcgtaaaccgccagataaagccgggaacatcgaaattaaacatgccataattgaaaacataatcgaaacctccgggtctctgctgtttcacccgcagcgccgtatgaccgaacaattcatacacctccgttccgggtccgcaagtcaataaactcacttgtaaagtatcgggcaagattcccggttttgattcctgcgcttgtattttctcgttggaaaacaaggccacaagaataaaacccagaattatacatagtttcttcttcataaacactccacattattgcagcaaaatcggcgtaaaagtacaactttccatctaattacctcggtatgtaactcttttattttctttgactttgataaatttcacatttttatttccacactctaccgaataattttttatctttgttcgaaacacaaaacagagtattatgaaaatcaaaggtttactattatctctattcgtaacaagcagcttactctcgattgcacaagacataaaactcccctccccgcaaaaacagggcggagaacctctcttgcaggttctctccaaacgcgcctcgacacgcgacttcgatacacaaaagaatatagactcacaaaccctttccaacctattgtgggcggcatggggatacaaccgagaagataagcgtacggcgccttcggccatgaatcgtcaagaaatttcactatatatcgtcacggcacaaggggtctatctctatgatgccaaacagaataaactggcggaaatcgccaaaggagatttccgggaaaacgcaggcatgcaaccgttcgtacacactgcgcctctcaacattatttttactgccgatttggaaaaagcgccgggtaacgacatgatgttcgtcgattgcggattcatctcccagaacatttatctctattgtgcctcggtcggtttgggtacagtcgttcgcggctcgttcaacggcgatgaattggcaaaaatattaaagctgaacgaaaaacaaaaagtagtattgacccagactgtcggctatccggctaaatgatttctccggaaaaaccttacatcatgcgacggttctcatttctcttttttacgatcgttatattcctgtcttttttatctggttgcaaaggcaaacaggtcgaatctgattacccggaaagttctcttatagatacattcgaagtaaaacaacaaccccaaccgcgcacaaccggctggaaaaagagtcctgtacgatattccagtttccgcaaactattcaacgacttgaacgacaaacatcttgctgttgccaaaaagaacgggatagagccattggaatcgctcgatgatgcccggaatttgggattctggaaacttgctaaaatagacagttgtgaatactacaccgtcgataaactgactcattcgatcccatatctgactcccaaaaccaaatggttgctcatgaagataggcaaaaacttccaagactcgttaacgaaccgaggttcgggaggaagacaaattattctcaccagcgcattgcgttccgatgaatcgataaagtcgttacgccggcgaaatacaaacgccagcgaaaactcggcacaccgttacggcacgactttcgacatagcctacaatcgatacaacgtaaccgactcgacctatttcgtaccctccgaccgactacgaattttactcggcgaggttctgtacgatttacgcaaagaacacaaatgctacatcaaatacgaaatacgccaaggctgtttccacattacggcgagataaatcaaacgacaaccgtacaatcgaccggcctttcgtgaaaaattattatctttgtcacaacgaagatacgatgcggttcggcatagccaaatcggaaacaagattttcgtttgtctctgcactcacctttccgtatctttgaggcgtttaacaataatcgaccgatgaaacgatatttatatgccctgcgctatctgatttcgatacatgtgttgggactcattctctttacggcattccgtctgatcctcttcctacaagggtacgaatatctcatggacgaagaaatttcggtattcacccgtctcgaagcattcgtccggggattgtggctcgacaatgtcgtagcctgttatatatcgattctgccgctcgttatcgtctcgctctgttccctgataggatatttcggtaaaaacctgtaccggggaatccatatctttttctcggtcttttacgtcgtggcgttcgccatatcggctgccgatataccttatttcgcttacttcttcaaacacatcaacgcttccattttcaactggttcggctacaccggaacgacattgggacttatgttcggtgagttctcctatatcgtcgcattcgtcttgtttctgtgtctctctttccttttcgtctttctctcccgaatattattacatcggacttgtcgcgatatacaaagagtatctgccgaaaaatttcattggaaacccgagctgcttacactcctttgctcgactcttctaataggagtatgtttattcggcatacgcggacgcatgggatacaaccctatcaaagtaagtgcagcctattattgcaataatacatttttgaaccaattgggtataagcccctcgttcaatttattgcgcagttcgttagaggcttccaaatcggaaaatcgggaaatcgatttgatggacgagaaagaggcgatctctacggttcgcagagaactgaatatcacggactcgcttcccgacatatcgcccattgcccgaaaaatagaaaatccgggacaacccagcagcaaaaacgtagtcctcgttttcatggaatcgatgtcggccgaattactggggcacttcggtaatcccgagcacctcaccccgtttctcgattcaatagccgtccggtcgctttgcttcaatcgatttttctcggcgggaactcataccaaccatgccatacactccgtcttgtattcctatccggctctgatgaaacggaattccatgaaaggagccgttattcctttcttcgccggactacccaccattttacaagataacggataccgtacgctttttttcatgactcatgagtcgcagtatgataacatgaacggctatctgcgaaccaatggtttcgaccgcatctttgcacaagaggactatccgaaagacaaagtagtcaacagtttcggtgtccaagacgatttcctataccaatacgccctgcccattctcacagaaactgccgacgaggggcaaccctttttcgctgtattgttaagcatcagcaaccacccgccgtatgttattcccaaagatttcaagacacacagtagtaccgacgaacatcgaatcgtcgaattcgccgatcatgctttaaaggaatttatcgatgaagcgaaacaacaggaatggttcgacaacacgatatttgtcttcgtcggtgaccacgggaaaatcgtgggtactccccgcagcgatatgccgctcagtttcaaccatgtgccacttttcatttattcgccttcatttatcgaaccccgacagatagaagacctcggcggacaagtggatatagctcccaccgtattgggtttgctgaacatagactataccgacaacggattcggagtaaacctcctgcaagaaaaacgtaaagcggcattctttacctccgacgatgctatcggatgcgtgaacgattcactgttctatatctataaacccaaagaaaaccaagagtggttgctctcgcaagaaagagctatcgaaaaggggggcaatatcgacaatcctgccgtctgccaagaactgcgggaatatgccttctccatgcttcaaaccgcacaatacctcatgagcaacaacctcacagggaaatatataggttatcaaccccgttaaacaaccgactgttatgaataagatattttatacattcgttctttcggcgctcgtactcctttcggtacaatgtaacccgaaatcccaagaaagcgacgaacaactcgaaaacgattctatcatcgagtatgccgaactactctctattacctgtcatgacgactacaccgatgtaaaaataagcaacccgtgggacagcgcccggttgctgcaccgatatatcctcgttcccaagacacaaaacgttccatcgaatctaccgcaaggaaccgtcgtaaggactccgttgtccaatacattagtctatgcctcggtacattgcagcctgttggagcaattagacgcattatcgcaaataggaggagtctgcgacctctcctatatcaaaacgcccgctttgctctctcgtgcggaaaacggaaaactgaccgatgccggaaattccatgtcgcccgacatcgaacgagtaatgtcgttgaatccggatgccatcttattatctcctttcgaaaacgccggatacggacgtatcgggaaaatgggaatacccattatagaatgcgccgattatttggaaacttcacctctgggccgggcagaatggataaaattcttcggtctgttatacggtaaagaggtcgaagccgattccatttttacggaagtcgaaaaaaactataccgaattgagagataaaataggtgtactttcttctgctcccgttgtcatcagcgaattaaaaagcggttcggcatggtatatgcccggcggaaaaagctatatggcccgttttttcaaggatgccggagccgcttacccgtggagcgacaatacagaaacagggtctattccgctctctttcgaaacggtattcaaccgagcaggagaagccgacatttggcttattaaatcgttccacgtgtcggagctttcctatcggactctgcaaaaggaatatgcaccctatgcaaggttcaaagccttccgggagaaaaagatatacggttgtgactcgtcccgatgcaactactacgaagagactccgtttcgtcccgacctgttgttacaggaactcgctgcattgttccaccccggcctgttccccgactatcgattccgctactatcaaccgttatccgaatgaacgacaaaccgaacaagcaacatgaacaacggctaatagtcgttctcgtcctgttacttttggcattatgtgccgccaatttatggttcgggtcggtacaaataccggcttcggccgtatgggatatcctgtgcgggaaagaacctgaaaaggaggtctggaaattcatcgtgctggaatcccgattaccgcaaatggcggcggcactcctgtcgggagccgcattggcaattgccgggctgcttcttcaaacggcattcaacaacccgctcgccggaccttcgatattaggaatcgatacgggagccagtttaggagtggctttggtcatgttattttggggagggacactcggcgtgtccgaggcaaccaccctcaccggattcaccgccatcattgccggagcttttctcggttcagtcactgtattaggtacgatactctttttctcgaccattgtcaagaacaacatcatgctcctcattgtcggtataatggtaggctatattacttcgtcggttatctctctactcaactatttcgcaacagccgaaggggtacactcctatacgatttggggtatgggaaatttcagcggagtcaccggcgagcagctgccctatttcgcacttttcgtatctgtcggacttatcatcgcaatacttctgataaaaccactcaatgccttgctgctcggtgaccgttatgctgccaatctgggagtaaacattaaactcacccgcaatctgctgctcatcgtcaccggtctgctcacggcatcgaccacggcattctgcggccccatttcgtttatcggtcttgccgttcctcatatcgcccgactgttattggggacatcgaaccacaataccctgttgccgatggccttgctgtgtggagccgtaaccgcattgctgtgcaatctcatctgtatccttccgggagaatcgggcatcctgcccatcaatgccatcactccggtcttaggtgcgccggtgattatttatgtcatcatcaaccaacgaaaaatccaatatttcaactgatggaggaacagacaaacatattatcggcacagcagctctgcatcggatataaaacggggcacggacacgtcaagcaagttcacggcgatctgtcgttctccctacgcaagggcgagctcacctgcctgttaggcgcaaacggttcgggcaaatcgactctgctacgcaccttatcagcgtcccaaccttcgttatcgggaaaaatcctgttgaacggaaacgagttgtctgtcatgtcagagcgggaaatttcccgccaaatcggggttgtactgaccgacaagacacaaaccggaggattgaccgtatatgagctggtcgccctcgggcggcaaccgcatacgggatttttcgggaaactcgaccgacaggatcggcaagtagtggacgaagctatcgaagccgtgggcatctcacacaaagcgcactcctatatggcgcaactctccgatggagaaaagcagaaagctatgatcgcaaaagtattagcgcaagagtgccctctggttatactagacgaaccaaccgctttcctcgacgtggtgagccgcatagaaatcatgactctgttacaccacatcgccacggcccaaaacaaagcgatactactgtcgactcacgacatagaacaagcgctggtgctcgccgattgcctatggcttttacggaaggggcacggaatgcgtagcggaataaccgaggacctcattttgaacggagaactcgataccttgttcgaccgtaaggaaatttgtttcgaccgggcgcatggcagttactacccttcggttcaatgggaaaaagaaattgtcgtagatgcgacggacgaaacgcttctccattggacagtcaatgctctgaatcgtaacaattacggttgccgcatatcaccttgcgaagccgatgcatcgcttccccgcctcaccgtcgaaagaaacgactcgctgtcgttacacaccgcaacgaacgaagtgcgatttacctctttcgccgccttcattgcataccttaaaacaccgactcaaaagggttgaatggattccgaaggttgagcactatcaaccatacccgaaaaatagcacggaaaagggtctcaaactcctcctctacacactgtaataacatgtcaccttgttcgtaaaacggcaaccatagaccgggcggcattctttggagcgccgggagcacccaatcgctcggcaacaagatcatatcccgccaacattttctttcgggtagtctcttcgaacaacgaagttaactctcgacgaagattctcaggagtcgcccgatagcccaataactcgcatacgacaggactatcggctatcaaattaaccaacgaaacatacggtactttcaagattttctcgaatgttttataaaacaacttgcctcctcccagtcgatagcataccacctgaggcactcgcaacaaagcggtttcgagcgtagcggttcccgatgtgaccaatgccacccgactctgttgaagcaaacgataagttttgccccaaacaacttttaccgaacggtcctgcaaataaggagcatattggtcgggagaaataccgggagcccctgcgataaccaactgatagtcgtggaacgtttttgcggcctctatcattaaaggcagattatgatcaatctcggctacccggctacccgccagcagagctattatgggcttttttcccaagccgcactccgccgtaaaatcctcgaaactctcatcggcataaggccgcacagccaattcatcgaccgtaggatttcctacatactccaccgtataatcatgcttggcataaaacgaaacctcgaacggaagaatggaataaagtcggtctacataccgacggatactctttaccctccattccttccaagcccaaatcttaggagaaatataataataaaccggaatacccaaacgacgtttcacatatttggctattttcagattgaaacccggataatctatcaatataaccacatcgggacgaaatacggcaatatcctgtttacacaaacgcatgttcgccaaaactttatcgagattcatcaacaccggaataaatcccatataagccatatcccgataatgctttaccagcgtaccgccacaagaagccatcaagtcaccgccgaaaaaacgaaattcagcgttcgcatcttcctgttgcaaagctctcatcaaattggaggcatgtaaatcgcccgaagcctccccggcgataagataatatttcatacccgattaggaataattggtcacgtcattcgaccctgacagctgtcccgctacacgtaaccatcaacatactacccgatccgccgacagtctcatagtccaaatcgatacccaccacggcatttgcgcccaatgcttcggcctgtcgagccatttcttcaagagccgtatctttggcctctctcaaaaccgcttcgtaagaagcggaacggcctccgaaaaaatctcttacccctgcaagaaaatcacggaacacattcgccccgataatagtctcacctgtcacaactcccaaatatcttacaatctgtttcccttctaccgaaggagtcgtagtcattaacatagccatcgatttattcgttatttatccgattacaaatatagcaaaaggtgagagcagaggcaaaaagaaatcacatttccgacttgcctatcccgaaccgcagcttatcttcgtacttacaaagatagtgaaaggagcaagtagtacaaacatacttgttcttttttatcgagttacattctatattgcaattacaaaatcaaaacgccactctcccgaaagaaaatcgtcagccttccgcaataaagatgcaccgatatcgtttttataatacaatgaaagcgacaacttttgctttaattttactgagtatcttgacaggtacatgcctgacgagctgcatcgatgacgatttcaccacaaatccgtcgcatgtactcgcattctccaccgatacggttgctttcgataccgtattcaccacgataggtacatcaactcgttcattccgcatttacaaccggaacaagaaatcgttgaacatctcttccatcaaacttgccgatgccgaacattcgggctttcatatcaatgtggacggtatgtcgggcgataatttcaccaatgtcgaaatccgagggaaagacagcctatatgtatttgtagaagccaatatcgatcctaccaatcaggacaatcccattttcatcgtcgattcgatcgtctttgtaaccaacggcgtccaacaagacgtaaagctgactgcctacggacaggacgttatcatcaaaagaggggaaaccttcacgaccgatacccatctgaccgatgaacggccatacctcatctacgacagtttagtcgtggctccgggaacgacattacaaatagaacccggtgcaagactgcatttccaccatagagcttcgctgttggtacaagggaaattacaagtcgaggggtcgatggaagcccccgttcaaatacgaggcgatcgactcgaccggctctttgcagacttgccttacgacaatctcggcgggcaatggggcggtatccgtttttatcccgaaagtttcggaaataaaatatcgtacgcttatgtacgaggaatgacttcgggtatcgtattggattcgtgcgcttcggaagagcctcgtctcgaaatagcgaattcccgcatacgcaactcgtcgggtaacctcatcacatcggcatacagccgactaaattgttggaacagcgagctttccgatgccggaggagccatactctcgctgacaggaggaatagccgatttcacccactgcacgatcgtcaactactatttctacgacattatcacctcgcccatcgtaaacatgagctattgtgccccggccgatacgatttcgggaggtcccgcccttctgcgagcccgattcaacaacagcatactatacggtaatacatcggaaattccctcgatcgacctcaccggcagccatgtatatttccgttcctgcctcctccgttccaacggagaagacgatgacaatttcatcaataccgtatggaacggacaaccgtttttcaaagccactggcgaagaacattactactacgattatcgaatcgggtcggataaatccgatgctatcgggaaaggaaaccccgattttgcgatcttcccattggataaagatatgtatgggaaccttcgttccacgagcgtggatatcggagcttatcaatacataccacaagaaattcccgaagaatagagaatgcacataacattcaaaaatgcgcaaatagcacccttttcggtcttcctcctctcttaataaaagttacaaagttcaattactcaccctatttgtataacaaatttcttttttctctctcatttttctatttttgtaagagatattaaaacctctttctaaatatttgcaatcatgagcgaagagatacgacaaatagcggaacggctcgttggccttagagatgccttagaccttcgacccgaagatattgcatcgacctgcaacatcaatttggaaacctatttaggttacgagtcgggcgaaaaagacattccggtcagttttctgcaccagatagccaagcactacggcgtagaattgccggcattgatgttcggatacgaaccccgaatgaactcttatttccttacccgaaaagacaaaggtgtcgccgtagagcgtacaaaagcctataaatatcaatcgttggccgccggattcgccaaccgcaaagccgaccctttcatggtcacggtcgagccatcggctcccgaagcgccattcacgctcaacacccaccccggacaagaatttaaccttgttctcgaagggagcatgcatctacgtatcggagaaaaagaattagtgctgaacgaaggcgacagcattatattcgactctacccgtccacacggtatgaaagcgatagaccgacaagttaaatttctggcgatcatattttaaatgatctttccgtaacaataggtatttcacaaacatcaagtaaaaagagggaatattcccacatagtcattatgttagaacgctttttagataaaacgtctttctcttcacaggaagacttcatgaaaaattttaaggtaaaagttcccgattgttttaatttcggatacgatgtcatagatgaatgggcacgtatagctcccgaaaaaaaagctctgctttggaccaacgatcaaggaaaaagaatagattttacatttgccgatattaaacgagaaagcgacaaaactgcatcttacttccaatcattaggaatagggcacggcgatatggtcatgctcattttgaaacgaagatacgaattttggttttctattatcgctcttcacaaactgggagccgtatgtattcccgccactcacctgctgaccgagaaagacatagtgtaccgatgcaatgccgccgacataaaaatgattgtatcctgcggcgacgggattgtagtcgagcacatcaaccgggcccgaccgtcctcgccttcattacaacgttgtgtctccatcgggcccatcattccagaagggtgggacgacttccataaaggaatagaatcggctgctcctttcgtccgtcccgaatcggtcaacacgaatgacgatatttcactgctctatttcacatcgggaaccaccggcgagcccaaaatggtcgcccatgatttcacttacccgttagggcacatcatcaccggctccttttggcacaacctgcacgaagacagcctgcatttgactctggccgacacgggttggggaaaagccgtatggggaaaactatacgggcaatggtttgccggggcgaacgtgtttgtctatgacttcgaaaaattcaaaccggccgacgtactcgaaatgatacataactttcacatcacttcgttttgcgctcctcccaccgtattcaggtttctcattcgggaagacctcaccaaatacgatatttcttctctaaaatattgtaccatagccggtgaagctcttaaccccaaagtatacgaagaatggctacggctcacgggtataaaactgatggaaggtttcggacagaccgagacgactctcactatcgccacctatccgtgggtggaacccaaaccgggatcgatgggaatacgcaacccgcaatacgacatagacctgctcacagccgacggacgctcagccgaagatggtgaacagggacaaatcgttatccgcaccgatcacgggaaacctttgggactgttcaaggaatattaccgtgaccctcaaaaaacgtatgaagcctaccatgacggtatttactatacaggcgatgtagcttggcgcgacgaggacggatacttctggttcgtgggtcgtgccgacgatgtcatcaaatcgtcgggctaccgtatcggtccattcgaagtggaaagcgctctaatgacccaccccgccgtagtggagtgtgccgtgaccggagtccccgatgaaatcagaggacaagttgtcaaagctactatcgtactatcggccgcatacaaagacaaagcgggagaagctcttgtcaaagagatacaagaccatgtgaaaaaagtcacggctccctataaatatcctcgggttatcgagttcgtcgaagagttgcccaaaaccatcagcgggaaaatacgccgagtagaaatacgagacaaagacaaagtctaataacgtaaaacgatcgtcccatgcaaatcagtaacgattggttcgtcgccgaaacagaatttgaaaacaagtctttaatcatacgagggagactatttctcgatgccatcaggcaatcgggaaaattcgccacacgtattgctctcgtatgggaatatcagggcgatgaaaaaggcatgcccaccgaaaaagagacgcaagcgctcgatagcctcaacgagaaactgcgcgatatattggaagagaaagaaatcgcaatactaaccgccattcatataggaggaaaaaccgcccgctatgaatattacggaatctcagccgaaaaattctccatcgtcttgaacgagactttcagcgaatacccgccgctgccgataaaaattggagcggaaagcgaccccgaatggaacaactacatcgaaacgattcaacaattcgccatgcagccatgagttacaaacgtaaacgtattaccgtaaaaatagggagtaacgttcttgctcgtccagacggtacgctagacatcacccgcatgtcggctctcaccgaccaaatcgccgagctacacaaagccggagtcgaaattattgtcatatcgtcgggagctgtggcatcgggccgcagcgaattgaagatacaccgcaagctcgacgcagtttctgccagacaattattctcggctgtggggcaagccaaactcatcaatcgttattacgagctattcagggaacacaatatagcttgcggacaagtgctcacgaccaaagaaaatttttcgacccggcgacagtacctcacacaaaaacaatgtatggaggttatgcttgaaaataaggttatccctatcgtcaacgagaacgacacgatctcggttaccgagttgatgttcaccgacaacgacgaactgtcgggactcatctctgccatgatggactccgaaaccctcgtcattctcagcaatatcgacggtatttacaacggggctccgggacaagcggacagtaaagtcataccggaaattcaccccggtcaagaactgtcgcaatacatacagtcggggaaatcctctttcgggcggggcggtatgcttaccaaatgcaacatcgcccgtaaggtggcagacgaaggtatagaagtcatcatcgccaacggcaagaaagaaaatatcttgcccgatcttttacgggaaaacagctcggcgatttgcacgcgattcattccctctgccaaccccatatcgagcattaaacgttggatcgcccactccgagggattcgccaaaggagaattacatatcaatgccggagccgtgaaagcgatacactcgcaacaagccgtcagtatattgccggtcggagtcacccgtatcgaaggagacttcgaaaaggacgacattgtccgcatcatcgatcccgatggaaattccataggagtaggccgcattgcgttcgacagcgaaacagcccgagaatttatcggacatcagggtgcgaaacctttcgtccactacgattatctctatctcgactaactttaacgattccgatacaactatactcgaaaaaaaagattacttttgctttacacacattatgagctatgaccgccgatgtatcacatattttcgaaaacgcacgagtcgctgcccgcaaattgaatctcgtcgataccgagactatcgataaaatacttcttgccgttgcctacgaagccgagaaagaagtcgattacatcttgcaggaaaactgtcgggacttggctcttatgccgaagacagaccccaaatacgaccggttaatgctctcgcgggagcgaattttaggaataacctccgatatgagaaaggtagcagggcttccctctccattgggcagaatattggcttcattcgacaggcccaacggcatgcgcatcgaaaaagtatctgtaccgttcggagtcatcggcattatctacgaagcccgtcccaatgtaaccttcgacgttttttctctttgcttgaaatcggggaatgtctgtattttgaagggaggtagtgatgcccaatattccaacaacgctattatcaacattatcaacaaggtgttgataagttacggaatagactctaacacagtgactttactacctaacggtcacagctttaccgacaagttattaaccgccgtgggacaagtcgaccttatcattccaagaggcagcggtcgattgataaattatgtacgcgaacatgcgcttgtaccggttatcgaaactggcgccgggatatgccacacctatttcgacagtgacggagatttggaaaaaggccgcaatatcgtgttcaatgccaaaacccgtcgggtgagcgtatgcaatgcactcgattgtctgattattcacaaggaaagattatccgaccttgcaaacctctgtaagccgttgtctgaaaaaaacgtaatcatatacgccgacccgaaagcctatggcgcacttgcggggaaatatccggaatccctcttgcagccagcgaccgacgatagtttcgggacggaatttctggattataagatggccatcaaaaccgtcgactcctttgaagaggctttggctcacatagcccgctattcctcgaaacacagcgaaagtataatcaccgaaaacgaatctcacaaacaacgcttcgctcacgaagtcgatgccgcatgcgtatacaccaacgtgtctaccgcattcaccgacggaggacaattcggattcggggcagaaataggtatcagcacacagaaactgcatgcaagaggtcctatggctctacccgagctaacgacttataaatatattatttccggtaacggacaaacccgtcaataaaacattatgagacatttcactaacgtacacgacctcggagatttaaacgctgctgttaaagaagctctcgaagtaaaatccaatcggtttgcctacaaacacttggggcagaataaaaccttgatgatgattttcttcaattccagcctccgtactcgcctaagtacacaaaaggcagctatgaatttgggcatgaatgtcatagttttagacgtcaatcaaggagcttggaaattagagaccgaacgaggtgtagtcatggacggggataaaccggagcatttactcgaagctataccggtcatggggtgttactgcgacgtgataggcgtgcgttctttcgcccggttcgaaagcaaaagcgacgactatgaagaaaaaattctcaatcagttcattcgatattcaggccgaccggtattcagcatggaagcagctacacggcatccattgcaaagtttcgccgacctcatcaccatcgaagaacataaaaaaacagaacgccccaaagtagtcctcacatgggcccctcacccgaaggctctacctcaggccgtacctaattcttttgccgaatggattaaccaaaccgattacgaatttgtcattacccacccagaggggtatgaattagcccctcagttcgtaggcaatgcccatgtggaatatgaccagcgaagagctttcgagggggcagacttcatctacgctaagaactgggcagcctatgccgacccacattacggacaagtcatcagcacagaccgggcatggacggtagatagcgaaaaaatggctttgaccaataacgcttttttcatgcactgtcttccggtacgtcgcaacatgattgtttcggacgatgttatcgaaagtccgcaatcattggtaatccccgaagccgccaatcgggaaatctcggcacaagtcgtactgaaacgtattcttgaatccctctaattctatacttatgaaacggcttttgactttctttctgatatgtttctcattcgtcgaatatacccgggcagaagatattatcgactataagtactgggacgaagggaaattgacatgggacgatttccaagatactctcagtctcaaaggagtaccctcgacttttaacgcttttctgagaattgaaaaaacagaaaaacgagatggcaatacccgcacgatccgtcccgaagcgcaagcctgtttcgacaaacgtcattctttcgccgaccggcaaatacaaaacgagaacttactgcgattgttccagctgaaatacgatttgcttgaaatgtatcggcgaagattacaaaccgaattaaatctcggagtggtgggtattgccgccgataatcgcacccggcaatacatggacctatacacagaacaaagcaaaaaagcagaacaagaaaccgaaaacggacagaacgagataaagctgcaagaatgggagttctacgtaaccaaagaactgatcgaaaacccggctccgtccattcctcgaatctctccgcggcgattcggatacgggttctatttaggaaccggcgcctctttcccggtcgggaacatcgccgactattgggcccctgcttggcaaatcaatgtcggattcgatttagcttatgccaatacgcatctgctctgcgacttttctgccggaacagcccgtacccgtcaggaaattacagtttccaacggacaaatcacggatacatggcttcgaaacggacataacacctatacttctatatccttaggtataggacaacagcttgtctccaccaagtatttcgcccttatgccttatgccggatgtatatggtcgggatactccgatcaagcaaaaattcaagaagggagaaacgaaagaacgacattgtcctacacgaattttaattggacggccggaatatgtttcgactatcgcttctccacgacaatatccctagtcccttcattctggcgcggtcatcgtgaaatatttaccgcatcgattcgtacaaagctatttatcaatcgggagcaattccacaacttcaaaatagcacccgatgacaacggtagcatgctgagaggctgtaagctgggattctcggtcgcttgcctcggattcagcagattactgcaaatcaaataaaactacatttacgacatgaaacaatatctcgacctcttacaacatgtgctcgaccacggcatccttaaagaagatcgcacagggacaggcactcacagtgtcttcggttatcaaatgcgtttcgacctgcaagacggattcccactcctcaccacgaagaaactgcacttgaaatcgattatccatgaactgttgtggtttcttaaaggcgacaccaacgtgaaatatttgcaagagaacggagtccgcatttggaacgaatgggccgacgagaatggcgacttaggacatatctacgggtatcaatggcgttcgtggcccgattataacggcggacatatcgaccaaataaaagaggctatccacaccatacaaaacaatcccgactcacgtcgtatcattgtcagcgcatggaatgtggcagacctaccccaaatgaacttacctccttgccatgcttttttccagttctatgtagcaaatggtaaactcagtttgcaactgtatcaacgcagtgcggatatttttctcggagtgcctttcaatatcgcctcttatgcactattactcatgatggtcgcacaagtgaccgggctcgaagccggagatttcgtccacacactcggagatgcccatatttacaacaaccatatcgagcaagtgcgggaacagctttctcgcgaaccgagagacctgcctaaaatgaaactgaaccccgatgtaaaaagcatcttcgatttcaaatacgaagactttgaattgacggattataaccctcacccccatatcgcaggaaaagtagccgtataagtatgagtaaaatagcattaatcgcagccgttgccgaaaaaggagccattggccgggaccaacaactgttatgccacttgcccaacgacttgaaacatttcaaaacactcacgtcgggacataccgtcgtcatgggacgaaaaactttcgaatcattacccaacggcgctttacctaaccgcaagaatatcgtcttgacacataacacgtcattatcgtggccgaatgtaactgtcgtccatacgcttgacgaaataccgatacaagacacgacagaagatgaaattttcattatggggggagcgacactatacaacgaaaccatcaaaatagccgacacgctgtatatcacacacattcaccatacattcgacgacgccgacacattcttcccgaccataaacccgtcggagtggaaaatcgcgaattcgcaagaaatgccggccgacgaaaaacacgcttatccttatacgtttgtaacctataccagaagacggatagaaaaccgggaatcttccgacaaataaccgggtcaatccctgtcgatctgcctcacattcccgtcattgtcgaattccaattctacgagaggagccgtgttcaactccacttcatatccccaatcgtaacgagccgcttcgacaattccggcagtaggatactgtgtagcgacataagtcaacaaattacccggcaaaatatctatttgtaaagccgacggtaacacctgcaagttgccatctaccttttgccacccaccgtccttatagaatttcaattcgaatccattactcaaccaaactttgtaacggggctcttcattcttcttttcggccttaactacctttacatcggaaaaataagtactaacaaattgatgaacagaatcaggcaagtattgataatccacccgttcgtcctcatcacaggcactcaatccggcaagccctgcgaacaaaataaaactccacaaaaacgttttcataatctcccattttaatttttatcttataacaacatcgtttgccaatgggtcgattccttacaaaatttaaatagaatcatgttacatataaaataagcgaatcagaatgtaacacttttgtaatacaaatccaacatattgctataaaaatcggaaatcacaaaaataatgttaaatataatcgttttttcttgggtattttgtttgtatataaaattatatgcgtacatttgcaatgtgtttttcatggtattagaattaaggttaacaaagattggttgtcgtgatgacaatcaattttttcattttaaactgttccgtttttcatctatactttctctcatatactatccaagacactccataagaaataagcagtggtctatcttcttcaaatgattgttgtatctttaaattttaggtacatttgtaatcaaaatccaaccttactgcaatgaaaaaagcattattatccatcgcactatcggcatttgttttttcactgatagcgggaacaggactttcggccgattccccgttaaccgtatcgcaagctcttgccaagaagaatgaccggaaatcctattatataaatggatatatagtcggagaatacagagactactccaacaataaacacttctacaacatcgcaccgcccttcgatggaacctcggcctacctcatcgccgacgaaatcgatgaaatcgatttaagcaagatgatgcccgtacaaatcaaggactatgtcgattcgtacaatttagatgaaaatccacaatattggcgcaagcaactgaccataaaaggaacgttaaccgattacttcaccctgccgggaattaagaatctcacagattggatagcacccggcgaaaatgtcacagacgaaacgaaatactggaacttttatgaaacttttgaaacgaaaaaagcctatactcccaatagcactttaatgtatggaggaggaatctatgccagtgccgaaacatgccgatggaaattcgtaggcgctacatacggagacagctccaacgatatgaaatgggataatgcagcagcccacctacgcctcaccgaatcgacctccggcgaacccggatacatctacatgctcgaagataaaagcaacggaatcgggtacatacgcttatgggctgcccgatacaaagatgataaaggttctggttctttcggtgtatacatatccaatgacaaaggaaaaacttgggaacccattcaaaccagtattccaatcaaaaaagagttgaccgaataccaattcaaagtgatgcgtccgggagaactacgaataaaaataggtaaaacagagaactcgacgactggaatagacattgacaatatccacatcagcgactattatacgacgtcgtccgttgaaaacatgttgtctccgacaaatatacgaatatggagttcgaaaggtcatctttgtttcgacacaaaaatgcccgaacaaatcgacatctacctgataaatggcacactcgttaagactgaacatataatcggaagtggcaacatagccctacctgccggattctatatagtctcgataaaaaacaccgctacgaaaattatcgtaccataaaataagagagcataccccaacaccgatatgccctcttacaccaatttctattcccgaaatctattttacttcttaaccggtcggaacaaaacggcatcggccgctaccacattatcggctcctttattcgatatttccacataggcatcccggcctttcgctaaagtgtacttgcccacatatacccactcgccaccagtctgaccgacgacttccacatcatctttatagatttgcttttcttccatgttctttccatcgtagaccccaaccgaggtataagttgcagcactttctaatcgagggaaaaacatatatacctcatactctcctactacttgaacatcaggtatatatttcactgttttgagagtatcacccttagaatcatctaccaagaaattcaatccatatcctcggtaagtatcgaagttaaagttccagaccccatttagctcaacacacgatttatcatcgttatccaccaagatttcggggacacttccgtcggatagagggtctgttttcaaaacttcctgcaatcgggctatatccacatcttgtacatcaattccgttatctatcgacaaacaggcagccacagccgccgactgagccaacaccataaaaacaggctccatgcggatagacccgtacgcaatatgcgaagccgaaaggcataccggaacaagtaaattagtaacttctctgcgtttcggggtgatagcccgataagaaattggataaggaggaaaaccgccaatctccacattaccctcgtttttcacctcgccacgaacaacgattcgatcgcaattatgagaatccatcgtatacgcagcccaaccgataacatcgtcgactacctcttttcctacacaatgatgttcggtcatcaccaaatctcctatcatgcgccgtgcctccctcacataaagctggtgagtccaatgatgattatctacatattcgtctttcggatatccccatttcaacatctcgattctcataaattcaggaacccgttcatcatgtcccaagaaatagaaaagccctttcgtatagtcctcatgcgctttccatatctcggctctacgatcatagtcggcttcgggataatcccagttcatacctatcatatcggtagagataccgccgccattgtttatatcggttttggaattgggcatccgactccaaataaaataatcatataccgactttctcggagagactgcatgcaatcgcagaaccagttcataccgggtagaatcgtagttatctggcctggtgataggtatcatattattaggatcatcggtaagacaaactctgaaattataggcttgtatttttttatcgcctgttccaatcggttgcaatacatcgtgactgacaccccaaatcaatccgctcgtcgaatctcccggaaccacatacgggtctatcggatcccaaaattgatggcctcgcatcatctgaacaccattatacgtctctccatacaccgagttatcttctcgtcccacagtataggaaaccccggcatgagccattaaatctccttcatacgaacaatcgataaaaactttggctcgtatctgcttattcgtcttgggcgaaggattttccgagttttccacaacgatctccgatattcgtgctccgtctttcttcacttcgttcagcctatgagaatacaacacctcgacgttgccccgctcgacatagtccttaaaaatattttcggctaccgatggctcgaatatccactgttcgaactttccgtaatgatttcctatcctacgatagaaatcccgggccagccccgtaaccacgaatttattgccgatatcggtataaccaagtccacccgatgtcataccccccaaatgtctaccgggttctaccagcaataccgtcttgccttccatcgaagcggtataagcggcaatgacacctgccgaagttcctccatatatacaaacatctacactctcggtattcttcttacaactaaccaaaagcatcagcgatattatcgccccccacagacctaaacgtttcatatatctacctgtttttatattattcttctcattttatcacttcaatctcgacagccccctttatatcacgggaagaagatgccacttgaagagtatatttgtcgggttctaccacccagcgagaaaccctatcgtcatacaaagcaaaatctttcaccggaatttccaaagttacagttttctcttcacctctattcaaaaactgtttacgaaaacctttcaactccttgaccggccgcgataacgaagggctatcttgactcacataaagttgcacagtctcggcgccggccatcgaacctgtattcgtaatctttaccagcaccttaacggtatcggcctcggcatagacttttctgtctgttgaaacttcgccatatttaaattctgtataagacagtccatacccaaaagggaaaagcgaaggtatcttccgagtatcgtgccaacggtagcccacaaaaatatcgtccatataataaattgtctttccatcaccggggtacgacttctccccgaaataatgagcgccattatcttctaatctgcgtgggatagaaaacggtaatttccccgagggacttacttctccgctaatcacccgtgctgtcgcattacccgcctcagaacccagataccaagattgcatcaaaccgttcaccttatctaaccaaggcatagaaacagcatttccactgacgataattacaccaacatttttattgacttttaaaatttcatcgagcaacttatcttgtccgaaaggcaaatccatactttttcggtcgtcaccctcacaatcctgttggaaatttttattcaatccgccaaaaaacaaaacgacatcggctgccttcgctacggccactgcactgcgaacgagcgaatcggcatcataccccgaaggcaactcacgactataatcgggagcgcccgatgcgtaccccatactataaacgatatgctccgccccgtacttatcgacaagcccctgcaaaggagatacttcgcgatgtgctttcaactccgacgagcctcctccctcggtcaatttttttactgcattttcacctataacggctattttcttataccgacccggccggattgggaaaaaatctttttcatttttcaacaaaacaataccctcctcggcaacttttcgggcaatatcggtatgctcctcggtcaattttctacctaacggtctttgccgattcatatttgtcctaaaacataagcgaagtatcctgcgtattttctcgtccagcaacgattccggaagctcccctgactttattttttctaaaaagggcttcgccaaaaaatatttatcgtaggccgagcttatcccccacgtcaatccgtttgtccaagtacccatttccaaatccaatccgttcaaggccgcctcattcgtattatgagccgatccccaatcggtcaacatcactccgtcaaaagcccattcttttttcaatatctcattaatcagcgtatcgttatgcgaacaatattcccctttatacttattgtacgaacccatcactgcccacacgcctccttctgtcacagcagccttaaatgccggaagatagatttcattaagagccctttcgctcacgacgacatttatcgtatcacgccacttctcctgattgttcaaaacaaaatgtttcacacaagcagcaacaccgttctcctgtaccccacggatatagggaacaaccataacagaagataaataaggatcttcccccatatactcgaaattacgtccgctcaacggagtacgataaatattaactcccggacccagtataatatcttttctccgaaaacgagcctcctctccaagcgcttttccgtaccgataggataattcaggattaaatgtcgcggccaagcaagtcaatgccggatatgccgtacaagaatcgttcgtccagtgagcgtgctgccaatcgtcccaaacaaattccattctcacaccatgaggtccgtcactcatccaaatctcaggtattcccaaacgcgggcatcccggagtactgaatttggattgagcgtggcacatcgcaattttttcttccaatgtcattcgggacaatgcatcttctatccgctcgtccaccggcttggtctcatcgagataaaccggttgctgagaaaatgaacaaaagaaaaagtagcatacaaaaattatggttacaaaatatatcttcttcatagattttttcggtatctgttacctactaagacaaagtgatgagatacaatcgatttacaagattcaatttaatgcaccgaatttattcggtgcattaaatttccaaatcaaataaaatccatttatatcgatttaataaatatcctgataagcagcctctgaaccccagcccggattcgctgttaaaacacctttggacaactctatttccgacagaggtatttgaaggaatccgttcgtctcaggacgataagtaattgttttcgtgactgtttcggtacggcttcgataaataactatgtctttttgattttcgttgagcacccgatcggcatcgtgccaacgtagcaaatcatagaatcgcacaccctcgaatgccaattcgaaacgacgctcggctttgatattatccaatgtagcaggaacagaaggtaaattaacacgcgccctcacccggtcgagaaaactctgagcctttgctgtcccgaggttcaattcggcggccatcaataacacatcggcaaagcgaatcaaaacaagatcttgtgtattgttcaacatatagttatcgaccgtattcccgtacaattccatgctataattgtgcacgacggtatgtgtcccgtcggcatacacattgatgggaatatattttttctgaacataagaagtctcgtccacatgtgaatcggctccaaatgtatacagcacaacctcattgcgattcgtcacgttaaaaatagatcctgttttacgaatgtcgtcatcaaaccaatcttcccatattttagggtttacggttccgaatccccatccttgcccgaacgggaatgttctcaaataattctgtccacgcaaaccaagatacaaacatatttgattactcttttgatacggataatcccaattcgcgaatttattggagtatttaatagcaaataccgtttctttattaccatcgccttcccatttgagattattgtttttagtaaatttatagtcctgtacataggaataaggccacaaattccggaaatcactgaccaaatcgtgcccgctaatagaagtatcggtacattcgtcaagccatgcgatcacttgatctttggaaatttcgcctccatcaggcaacggcaaagactctttctgataataaccggtatagaatagaaatacacgagccatcaaagcctgagcagcccatttagtcacccgacccgattctacggcatcataccgttcggtaggcaataaatcttctattgcctttttcaaatcggcggcgataaaagcataggtctcggccgctggcgtacgaggaatatttaccgactcggaagtagtaatcaagcatacatctccaaacattctcgacaaatcgaaatagtaatgtgcacgaaggaatcgtgcttctccttccatacgtttacgatcttcttcgctattccactccactttatcaagtgcttccaagaacacattcgcacgaaatatgcccatataattggtacgccaagccacagcaaagctactctcgctccatttttgacactgagcgatcgctttggtagatatatccgttgggcctccgcctcccaacaaattgtccgaacgaagttccgaacttaaaaaagaagtctgtaacggatcgggcatagcaagtacggaatatatccctgttaaaacctgatcggcatcttcttgtgtagctggatagttctctatggttttcaaattagtaggctccgaatcgagaaaatcttcacaccccgttaaaaaaaggcccacgaataaggataatattatttttttcatggtctgactatttttatgtagtaattgcacggtttaatcaataatgtatattcactccaaacatgaaagaatacgctgccggataattccccaaatcaatacctcttgcccaagattgagcgccggtatatgccgagacctcaggatccaaaccggtatatttggtaaatgtgaacaaattttgacccgaaacatatattctcaacttttgtaaaggaatcttgcggaatacctttttgaagtcaaagcccaaagtaatattggttattctgaaaaagtcgccgtcctccacatacaaatcggacacatattgccaattaatagctgtcccattcaaacttggcagccaattcgaggttccttctccatgccaccggcccaacatatcagtagtatagttactggtatttacgaccgagttgacccgatacgatttaacaatttgattaccggccacgccataccctgcaatagaaaagtccaaagccttatacgacaaattgagattgacgccatagttaaaatcgggattcgggtcacctatcatttctctatcttccgtcgtaatcgctccatcgtggtccaaatctttgaaacgaacatctcccggtttcgcatccggcataatgggctttcccgtttcgggtgaaatgtatccattgatctcctcttggttttggaagattccatcatgacgatagccataaaaatagcccaatggcataccgacttctgcacgataaaaacggcctgttccactgcccaagatattctcggaaccttctatatattgatcggcattggcaatcctcacgacttcatttttgttatatcccatattggcagaaacgctatacctgaaatcaccgatgtggtcattccaactcagttgcagttccacacctttatttacaatatctccaccattcacccagggtccgctgggtgtaccccatattcccagcgcatttgtttgaaccaaccaatcgactgtctttttatgataccaatcgaaattaattcccaaacgattccccgctaacatcatatcgaatccgatatcggtctgacgagaagtttcccaagtcaactccttattcgaattgtattctataaatgagcctataaaaggagtaccgctcttatccccaaaataataatatgcggcattttgagagtttgccaatgccatcgtccctaaataacgaaacgcatcgagcttgttatttccgttctctccccaactggcgcggattttcaagtaattcaacaccgattttgcatcttccataaattcctcttccgtgacattccacccagccgataccgaagggaaatatccccaccgatgccctctggcgaaattggaagacccatcggcacgcataatgacagtcgccatatacttgttttgataatcataattgatacgaccgaagaaagaggctaatgtcgacacaccccacgccgaacccgaaagagtagttctccccttttctacggtcttggcgtttcctaaataggcatgaaagaaatcgtcaaattcaacatcttcgttcgacccagaataattttctcccaaaccagatttatctatcgtagttcctaaaagggccgaaaatttatgttggttatttatcgagaaatcatacgaaagcgtactttcaaactgccaaccgagccccatacctccttgttgggtcacggtattccgatatttaacttcggtactaccgttcaaattatatgcaggaacatatccccgataagaccaactgctatacctgataccgaaattattacgccacctcagatttttgagtggttcgagaatcaaataaaaattaccgttgagagaataattcttgctctgtttcattgcactattatagtacatttttgccacagggttaaactcatctttatttatctttaccggatctgcaaactctccggtagcttcgtcatatgctgggaacaaagggcttgttttaaaagcatttctaaaatcgttccacgtcgtttgaccggtcgcttggtcaagccccttcttatcggagtaaaccattgtcatcgtttcccccactttcaagagatcgagatcttttaattttattaaagtatgttccgaattcaaccgtatcgtataacgatcaaaacccgatcccacttcgtcatcgggaacagcaaccgtcggtttctgagatgtataagagaaacccatcgtaaaagccgagttctcggaacctttatttatattgatagcatgattttgaatgggggcatttttttgagtcatctcatctaaccaatttgttccgtcccactcgccgttattaatcttatccaacataggaaccctttcggtattcaagtctgcctcggttatcaaacctgcttcttgcagcaacatcagataatcgcgagcccccgttgtctccacgttatttctgaaattctgtattcccacataaccgtcataagtaatgttggtttttcctttctgagcccgttttgtagtaaccaatataacaccgttggcagccctcgctccataaattgcagcagaagcagcatcttttagaatatcgacagtctcgatatccgatggattcaaagcattcaaatctcccggttgtccgtcgataatacacaaaggttccgaatcatgcatagttccggctccccgaatgagaacattaaacccttctcccggttttccgttattctttacgatactcacaccgggagtaagaccttgtaaaccgctcaacgggctcaccgtattttgctgggcaattacatcgcctttcacctgaacggtagcacccgtaaccaattttttctgctgtactccataaccgatagcgaccacctcatctaacatgtttacattctcttcgagctcgatatcgatcattttctgtccatttactttaatctctttggttttataccccacatacgaaatttccaatatcgcattctcttgtacagtcaaagaataaactccgtcgatatttgtcgccgtagctttcgtcgttcccttctctttcacgactgcaccgatcaaaggttctcctttggagctaacagtaccgccaatcgtcactgtgttctgtgccgataccatggaaggacacatcattaaaaagaagaaaagtaaagcaaaatatcgcaaacttctctttctccgaaaattgtttacagaaatcaaatccatatttttttagaattaagcgttaattatttttttacatacaccataaaatgactctgcgattttaattcatttttcacatttcaaaagtagtgtaaaagattttaagcaatttgtatataatacaccaatagttgaacctatgattttctatttttaaccacgttgcaagaacttaaaaaaatgtagcgccgaaagttttcccggccccaccaccacgaaacagaagctcgcctatccatttttacccctcgcaaataacccggctcatataaatttttccaacatatccctaaaacaaaatacgatgcgtatatccatcgaaagccgctccgaaagcccgatcggctcccgtcttgtatacaacgcgacaaaaaagcaaccaaatgcaacatgattgaaaacctcgcctcaaatcctaaaaaattggaatatactccacaaccccctatcgtctaaaaggaataaatttgtattgtcgaaatatacctatgaatcaaaaatttcaaaccgataaacaattaatcaaatcatgaaaaagaaaatttttaccttatgtttgttcgccgcgttcatattgaacatttattcacaagcacccgaatcatttcaataccaagcgattgtatcagacaataatacaacattggtaaacaccgacgtatcggtacgattcacgattcgtgaaaaaacagcaactggtacgaaagtatattccgaagtacatcaaacaaaaacaaacagtttcggaatggtcgctttacaagtaggaaaaggaaccgtcgaaacgggagactttacttcgattaattggggaaaaggatcttttttcatcgagacagaaatagacaaaggagccgggttcgtttccaccggggcacaacaacttatgagcgtgccttatgctaaatacgcgaaccaagcaggcaaaatcacgttaacatcagcctcaggtaaaaaattcacattaaccatcgatgatgaaggaaacatttctactcaaaagattaccgaagaataatttcctctgaattaaataccagatcagcaatgaaaaaaatattattcctactgcttctatttcctctttctttaagagcgaacatactgatttcaactgcatgttccgaaggcgggagtacaacatggacaatcggcgaaataatggttgctacgctatcggataataattccgaaaaatctctgacacaaggatttttgcaacccgaacatattgtaccttccgggatattcgatatacccgaaaaggccactcaaataacaatcttcccgaatcccgccaaagaaaaagtttttgtcaaaatagacgaacctttcacatggtcaatatatgacacacttgggaaaatacaatccacaggaaaactatcgggaactccgggagaatacataaacgtagacaatcttactccgggatattatatcctgactattacatcgtcaaaaggaagttcttctattcaattgattaaataacaaacatagcggaaatgaaaaatcacatattattaatcgtaagtatcttaaccgttatctcgataaaaggttatgggcaaaacggttttccctaccaagccgtacttcgagacaataccggcactacaataaacaaccaaaacataaatgtcctattctccatttatcaagggaacgatgaaactcccgtataccaagaggagcactccacaacaacaaacgctgcgggtcaattctccttagagataggagcagggcattctttaatcggggattttcaatcgatcgattggagtaaaacgcccagtttcatacaagtcgaggccgattatggttcctctcacaggctgataggacgacaagagttactcagtgtcccttatgcacaatatgcagaccaatcaggtacactgcaaacgacatcgaaaagcgggaaaaactatcaattgaccgtagacgatctggggattctacaagtcgtcgaaattcccgaaggatataccaaactggtatttcaagacgaattcaacggaaccggattacccgatgaaagcaaatggggctacgaagttggattcatacgaaatcatgaaatgcaatattacaccgagagacgtgtcgaaaatgtatttcaaaaagacgggattctacatctcagatgcatcagcgaagacaccttgaaaaatgaaaaaggcgaaatactgaataaaaacataaccgacggaaaagagtattacataacatcaggtagcattacaaccaaagggaaacacgcctggacctattgccgggtagaggctcgcctgaaagtaccccaagcaagcggaacatggccagctctctggatgatgccctccgacaacgtctatggctattggccacgaagcggagaaatagacattatggaatatatcggaaacgacattaacaaattctattgtgccactcactacctcaatggagataaaggtagcaataaagcggtagataatataaacgattggcacatcatcgctttcgaatggcatgaagatcgaatggaattttactgcgacggacgaatgttttatcggatattgaatcccgataccaattggggagactggcctttcgaccaagatttccacctaatactcaactttgcattcggcggaggttggggaggagaaaaaggtttcgacaccagcgttttgccattggattaccaaatcgattatgtacgaatttttcaataatacgaccatgaaaaagaaaattttttattcattgctcatttgtgcggcatcaagtgtgtatgcacaaacgggaaacgaaatctccgggaaatataccaaacttgtttttcaagacgaatttaacggaaccggattacccgacaaaagtaaatgggattttgaaaacggacatctccgcaacagtgaaaaacaatattacacgaccgacaggctcgaaaatgcctaccaaaaggacggttatttacatttagtagctcgcaacgacagctccttgataaatgggaaagtgcgtcctataacatcggcaagtatacatacgaaaaataccttctccctaaaatatgggaaagtagaagtacgagcgaaattaccggcttgtctgggtacatgggcagccatttggatgatgccggtaaaaagcacttatggatactggcccaaaagcggcgagatagacatcatggaacatgtaggctacgaccccgaaaggatcaactatgcaattcatacagaatcgaataatcacacgaaaaagaacgggaaaggctccaatgctttttgccctacatgttataccgatttccatatttatggtttcgaatggcacaaggaccgactggaatggtacttagacggaagaaaaagattggtcattaccaaacctgaaaatgcaacttgggaatcatggcccttcgatcaaccgttttacctgatactgaaccttgcgttcggtggcggctggggaggactaaaaggccttgataccgacatactaccacaagaatatatcatcgattatatcagggtatatcaataactctatcacttacaagaaatcttatttagtacagaatttattaacttttaatttttatcaaaatgaaaaagaccttttctctattcttagcattcgctttgggagtcgtcgtacctcaaacctttgcagccgactattatgtatcacccaccggcgatgataaagcggcaggcacatcggccgaaacagcactgaaaacaattcaagctgccatagaaaaactggaagacaatacacccacgacaatacacttggaagaaaatgcaactttcgacgtatatggtcccgaagcaattattatcggagctaaaaaaaacgtggttcttcgagggaaaaacacgaccctgaaatcgggagaccaaccattcttgggagaccgtgtcatcacgatcggaaccaataccgatgcaaccatatccggactgattttgaaaaacggttgtacacgggacggtattcccggtggagccatattctttgaaggaaatgaactaatcgtagacagctgtactttcatcaacaacgaagcgaataacagcggtggagctatcgccagctgcggcaagaatgtaacgattactaattgtgtattcgacgaaaaccgcatcttcggaggatatggcggcgcagctatcatttaccactgcggcctacccaataacgcagaagaaccgggtgctctaattatcagaaatacagccttcaccaataacatctcaaaggccgatgcaaaaggcgacatcatcggattccattatgcttatcggggttcggaatacacgcctctgtactccaacgtcaactacttcgaattgacaaactgtgtattcaaagacaatgagccgggagtaagtccaagcgtaagaccggctgcctctgacatttatatcaataatgtgagagaagatttcgagatgaatctcataaacaacacgttctacaaaaccaaagcggttgccattccgttcttttacgaaactccctatcgaatcataaacaatatattctataacgacaaagactttacgatcatgtcctcgaatatctgcggagaaagagaccctctgatcgcctataacaatgttttcgtaggaggattgggtgaaaacatggacgatcccgcattaaacgccgaaaaggaaaaatacgggaacgtcgttttagatgcggtagaactaaataaattaggcttgactcctcgtctgcaagatgacaattatgtaccttacttgcctattaccgacgaatcgagtatcctcatcaacaaaggtctttccagtacctctggaatggaaggattcgataaagaactcattcccgcaaccgatattagaggcttggctacggtcgacggtaaggacatcggttcatttgaatatggaagcacatcgggtatcgccggaataacagccgacaaacaagcctcgttcgtcatttatcggaatggcgacgaagctatcgtccgcaacctcaccgaccaaactttgaacttgtcaatcgttctgctcgatggccgtactatctacaacgcagctctgaaagatgaacttacgattaacaaatccgaactggaaataccgaacggagttctaattttcacggtaaacaacggtaatcgttttgaatctcaaaaagtaatattgttctaataaatcaccgaaacaggaagagccgcttaaatattttaagtggttcttccatttttcaatttcataaattcttgtatcatgataaatataaacgtaaaatttgctgctgccacattgttcttgatgggcagttcatggactatctccgcacaagaactatcgatctctcatgcgactgtcggttcattggaaacagaaataacagaggccctcgacggagccgatatctcatcggtcacaaaattgaccatctttggagaatcacttgataacaccgatgctacctatcttaaaaccacatttaaagatcatctcgaagaattggatataacaggtataacatttatcgataacagtgtcacggacaagttatgccagaaaatgacaactttgaaaatcgtgtctctccctaccgatttaactaaaatagggaaatatgcattcgacggatgtctaaatctggaaaccgtaaactggggactcgtagaaaatatcgatgattatgccttccaaaactgtgcgaaactgaaattaaattccttacccgagaacttaactcgaattggacaatacggattctcgaaatgcgccgaaataacgatatcccaactacccgatcaattaacaggattcggcgtacgggctttcgaattttgttcgaaactaactattaacaaaatagcatcgtctgttaccgacatcaaagaaagagtattcgacagaaccggcattaccgacttcacgttctcggagaatatagccaacataggaaatctggccttttttgtcgaaggaaacccgacaagaactttcacttgccggaaagaaacagctcccaaattaggagatcggtcattcggtgctgcatctggaatctccaatacaacggtaaaagtacttaaaaaatatgccgactcctataccgcatggagcacagccggaatgacattggattacctgactcacaaggttaatatctctgtcaaaagtaatggcacgatagaggccaatggaagcgggcttgtatccgaaaacaattccatcgaagatgggacaactatcgaggcctatgaaggtgaaagcattacgttcaccgtgaccccggcagccacagtaaaattaaacggagaagaaattaatcccgatgaagaaagccaaaattcatatacaatcgctataaacgaagatgatataaatctggaaatagatttttccgtatcgactcacatcgaaaaattagatgatacagtaacttcctgtaatgtcaaacaaaaaatactctatatcacaggcaaactgacaactccggttatagtgtttaactgtgtaggaaaccaagttatatccacacaagaaccaatcatagatttaagccttctccccacaggaatatacatcgttaaagccaatcatcaaacgttcaagattatcaataaataaaaactttaacctcaaaacgaaagccggattttgaaaatccggctttcgttttttcagactcatacgaatctttttatttatctccctgaactaaaataaactccgcttttttcacatcatcgggatttcctccgacaaagacctcaaacaaaccgggatccgactcacgacttccgtctgcaagtacatactccaaatcggccaatgataattcaaacgagatatcggttctttctccttttttcaaaaagacctttttgaatcctttcaattctttttcgggacgagttatcttcgaacaaacgtcccggatatacaactgaaccgtttcttccccgtcataatttcccacattggcgacagatacatcgatacgaagtttctcacccggaaacatagtatccttatccagtttcaattctccatattcgaagcgggtataactaagcccatatccaaacgaatacagagacacgttcggacaatccaaataccgcgttacataccgcacattgggaacataaggacgtcccgtactcttggcattgtagtacaccggtatctgaccctcgttataggggaaagacatagtgagtttacccgatggattatacttcccgaaaaggacatcggctatcgcattcccagcttcggaacccaactgccaacactctacgatagtacctatattttctttctcccaatcgagaaccaacggcctgccgttactcaacaacagtacaataggtttccctgtctctttgattgctttaagaagctcccgttgaacacccggtaaagtcaaacgggtacggctggcagcttctccgctcataaaccgattttcacccacacaaacaatcaccacatcgctattttctgccacttgtaccgcctcggaaaaaccgcttcggtcatctccctctatttcacatccttttgcataacggatccttacacccttgccgacagcttgcttaatgccctgtaatataccgatcgcatctttaccgtctccacgagcgcaccaagagcccaacatatcatctggattatcggccagaggtcctacgattccgatatttttacagcgattgtccagaggcaatataccctctctattctccaagagcacaatagatttgcaggccatctcccgaactacctttctatgttctgccgaaagtatctctgccttttcccgctctgcatcacaataacgatacggatcatcgaaaaggcccaaatcgaatttcaaccgaagaatacgtctcacggcatcgtcgattaaagattctgaaactactccctcaagaaccaatttttcaagagacgatacataacaatatccttccatatccatatcacagccggcagtaacagccaactgggcagcatcgcacttatcctcggcaaccccgtgaggtattaactccgccacagagccccagtccgaaaccacaacacccggaaaattccactctcctttcaatatatcccgaaccaaataagtcgaaccggtcgcaggtacacccatcacctcattgaacgaattcatgaacgtcgcgacacctgcatcagctgctgccgaaaaaggaggcaaatacaattcccggagtctttgtttggaaatatctaccgtattataatcccgacctccttctgcggccccgtagcccacaaagtgtttggcgcaagcagccatcgtattgtatgccgataagtccgttccttggaatccccttacccgagctttcgcgattgccgaacccaaatagggatcttctcctgaaccttccataacacgtccccaacgagggtcacgggcaatgtccaccatcggggcaaaggtccactgtatcccggaggccgtagcctcctcggctgccactcgggccgatttttctatcaagtccatatcccatgagcagctctcggccagcggaacaggagaaatcgtcttataaccatgaacgacgtccaatgcaaatataagaggtatatgcaacctcgtatcgtttacggcgatttcctgcaaatgacgagtacgctcaactcctacgacattgagcatagacccgacctgacccgaacgaatcagctcttcttcattggaacactcggtaagttgtccggtaggatcctctttactcgatacttgattcatctgtccgattttttccgacaaggtcatcagacgtaaaacagaatccactctctgctccgtcctatcttccttcgccgcactccacacactcccggcgaacaaaagcaagaataggcacaaagccattcttttcatttctttaactatcatactcttcactatttaattttacatcaaatctgccttttcacaagtaataatgtgaggactatgcgcaaatttagaaaaatcctcactggccggatgccccggaatgggaatataatagctctcctcctcgttccacatattgggtccgaaaacgacatagcttatcttatatttagaaatcaccggatccagtatagaagaaaagaaattggatatttttacccctttcgaccctgtgtccgttaaagcaggtaattttttgttcgcctcggcaaaacggttcatggccgataaccccatattcaatcgttgtttataaagagagcccgactcatctgactcaaaatcttgatatagattcaaccctacaatatcgacatacttgtctccgggataatactggcttatttcctcttccgatacgattccatacatcgaatatgcataaagcacatgatgaatattttttttattccgcagataatcgaccgtcatgtgccataaccgaacgtaatcttccggagaacaatgtcccatgccccaatccatactggctaaattcggagaatgaaacaaatgaacgataacaggaatatgtctgccatcactatttttcagagtctccaaaaaaacagcgactcgatctaaatactgctcatactcgacacggctctcattaccggacaataccgaacgaactacattttgaagagaatccttccgcaataagaaagataaagatggattccaagagagaatcgtcacaccgttcctacgatacacctgctctacatattgtctgatacgaaaaaacggtatagaatccacattcaattcagaacccgactctatcccgcctaaatcccaatctacgaccgcagggtaattgccacagacactttttacatcggatcgtcccggctgattataccacatgctgccgtaagctaaggcatctttatgtccaagcattataccagcctccaaacgggaagttaaatcatgacaaaaatctttcaattctgccgaagccctttcgtccgaaacagtccacgcaaaatttgtcacactcttagtttcgttacaagccgaaagccagccaaccaacggcaggcacaaacaaaaaattgcttttgggaaactccacatatcttttttaatttatcaatttttaaggctcaaattttatatcctccctactgaaatatatcatttacacatcgatacaaatgtagatattcgcacattaaacgggttgcacaattcatagatactccttttgcaaacgcgctgccggttgcgtaaatgttgcagatgattaaatttatgtagccttcccatttgcaagctatattattcgaaaataaattgtatttttgcgtcaatagaaagagggacaaaactagtctgcctcccactattcggacatttcctgctttcacattatattgcaattcattaatacgcaaagatttcaatttgttcaattttaagcgcctgctaacattatgaatacaaaaaggctttttctctttatatgctccttattttgctttatattagttcaagccgataccgataaattcttcggttctaataaccaactttcaaacagccatgtcaatcacatctaccaagataagaaaggatatatctggatatgtacagaaaatgggttaaacgtcttcaacggaatagattttaatactttcacccacatagccaacgattcgacctcattggccaacaattcggtgttatcggttttggaggataaaaaaggaagattctgggtagggacgaccgatggtgtacaaatcttggatcgcgaaaccggtaaatttcagaaagtaaacctttcttaccgaaacattaccaatttcagctatataaaatgtattacggaagacagcaaaggaaacgtgtggctatcgaccaatcgttcaggtattatccgcatcaacgagaattccatgaatgcagtatattacatgcagaccaacagtaatatttgcagcaataaaataaatacgatttatgaagatcgattcggaaatatctggataggttcacaagacaatggtataagtgtattgaatgtcgataatcataccattgtcaactattctcacgacccgacgaacccaaacacattatcgagcaacaagattttttccatcatagaagagccttccgggaaaatactggttgcaacaatagatgggaccatcgatgctttcgatttcaaagaacggtctttccaaaggaattacataccctccgtcgaaatggtatatactctatacaccgatagcaaaaagaatctttggataggaaccgacggcttaggcctaaaacgatataacttcaaagacaaaacgattacgacatacgaatcggagttgatcaacttggacatgagaaaagccaaagtacacggtatattcgaggataagcaacataacatttgggtcgccttatatcaaaaagggatattgatgattccgctcaaagacaaaatattcaaaaacataggctttaatcctttctacacaaacaaaagcattggcaacgaatgtatactgacaattctggaagaccatacaaaagatatctggataggaaccgatggagacggcatatacagactgaatgccgaccgaaaagtaaaagctcattataaagacggcaagttccccgccaatgtcgtcttatccatcttcgaggattcccgaaaaagaatttggatagggacctatttatacggcttatatctgtacgacgaatccaccaaccgctttgaaaaaaagaatttgcgttgtaacaacaccgaggtgaaacatgtaaacgccattgcggaagatgaaaagggcaacctttggataggaaccaatgagcacggcgtatgtaaatataacccgaaaaccgaaaacgccgatttcttgctttatgacctcatgaaatccaaaaaccagatactcagcaattctgtcaacgccatagccatagatagcaactacatctggataggaacaagtgtagccggattaagccggtatgacatgtccaatggaagttttgaagattatacagcagaaaacggaaaactaagtaataacaacatttttgccctaaaagtcgatcatcgaggaggtgtatggataggaaccaactggggtctcaattatattaatccgaatacaggaaaaatcctccaatacaccgaaaaggacggactacccaatgcagccatcagcggaatagagatcgatgcacaaaatcacctttggataagtacttattacgggttatctcattacaaccctcaacgaaacaaatttaccaattattatacttccgatgggttggtaaacaatgaatttcgaagaggtgcttattttcaatcaataagcggagaaatctttttcggagggataaacggacttaccttcttctatcccttcgagagccaacccagctataatttatcgaaccttatctttaccgatctattcatatacaacgaaccggtaattcccggagaatccggctccatcttaaagaagtctatcgattactccgacgaaattcgtctgaactataatataaaaaatttctccatcggattctcggcattggaatataacaaccctaacaatgtcatataccaagcaaaactagacggatttgaaaaaacatggacgactttacccaacggaaacaataccgtaacttatacaaacctgaaaccggggaaatataccttatatattaaagcccacttacctcataccgaaccgatcagccgaaaaatagacatcgtcatcactcctccgttatggttatcttggtgggcgaaaggtatctatattctcgtcattctcgttggggcatattgtacatatatcaatattaggaacaagaacctccgaaaaaaagaagacctgcaaaagaaaaacgaaagtaaaatcatgcagtcccaactgcaattttttaccgacatttctcacgaaatacgtacccctcttactttaattttaactccgatagaagaacttatcaaaaacacgacagatgaaaaactgaaagaaacctacaaaattatagaccaaaacgggcatcgcattttacgattggtcaatcaagttatggaaatgcgtaaactcgacaaaggacaagtaaaattattagccgaagaaacagatgtaaacatatttattcaggaaatcatcggctcctttaaacaccttgcccaagaaaaaaatatatcgttcgatgtccacattgtcgacaatttgccctttgtatggatcgatcaggaaaagctagataaagtcattttcaatgtgctttccaacgcttttaaatataccccgaccaacgggaaaattggaatggtcgtcgatacgactgagtcattcctcagaatccgtatttccgacaccggttgtggaatcccgaaagaactaagggaaacggtttttaaccggttctatcaagttcccaacgaaaacaataaaatcaaaatgggcacaggaataggattacatttgtctcgtagtttaatggagatacatcatggaaaaatatttgtagaagatacagaacaacccggggccacatttacagtccttcttcctttggacgaaagctacctaaaagaagaagagaaaaagttggaacactccgatcgtaacttagctacacttgtacagacttctgtcgcacctttcttctcaaatgaaacctcctcaaacaccttatcccctcaaaataaatacaaaccaaaactcttggttgtcgaagataaccaagagattagaaattatatccacaaagtcctatcaaccgaataccagataatcgaagcgagcaatggtaagaaagggctagaaatagccatcaaagaaaatccagattgtatcatttcagatgttatgatgcccgaaatggacggaatcgaaatgtgcgataaaatcaaaaagaacgaacagaccagtcatatcccggtcattatgctgactgcaaaaacagcgatagaacaacgcattgaaggactaaaagctggcgcagactcttatattcccaaacctttcaatatagagcatttgaaaataagaatccgcaaactgatagaactacgccgtattatgaaaaataaatacgagggtaaattcaatgaaatcaaagaagaagtaaccaatataaaatcaacagacgaaaagtttttggagaaactggaaaacattgtaaaaaataaaatagcagaatcagatttatcggtcgaaacgatcagtcaagaaatcggtatcagtcgttctcaactacaaaggaaattaaaacagctcaccaatcaaaaccccagtgattacataaaaacgacgcgattacgacatgcggcttggttgttatcatgcaaaaatttgagcgtttcagaagtttcctatgccaccggattctcctcgttatctcacttctcaaacagcttcaaagagttttatggtatgtcgcccagccactatatggaaattcaccgctcgaacagggattccgagaaaccaaaaacagaaaaataacaatcttgattcccaatttaccacaataaaaaagccgtatctttcgatacggctttttcttatcaaaaatttatatcgttattcctcattaagagtaattctcttacaagcaacagctgtaagttctttgttgcttgaatgaagatactgttgaatagtttgcttgggatctttcacaaaagcttgttcaagtaaacaaacttcttgatagaatttgttcagacgaccctgagcaatcttatcgagcatttcctctttcttaccctcttgacgagccttatcttttgcgatttcaagttctttttctaccacatcggccggaacttcatcacgagaaacagcgatagggctcatagcagcagcctgcatagccacatcgtgagctacctgataatcggtatcggcgaggttaaaacctacaatcgtagccaatttattccccgggtgaatataagcggtggtataaggagccgaaatagcttcgtagtaaccgagctccatcttttctccggttttaccgatttcatcgacaatcaagttagcgacgggagtaccattgacaaccaaagcctttacggtttcaagatcggtagcttttgcctcgatggcagcatcgagaatagatttagtcaaggctacgaaagaatcgttcttagcaacgaaatccgtttcgcacttcaaagctacgatagcagcgaaatcgcctttggcagcagccaaaacgcaaccttccgaagcttcgcggtcttcgcgtttagcagcgacagcttgaccttttttacgaataatttcttttgcagcttcgatatcaccgttagtctcggtcaaagcattcttacaatccatcatgccggctcccgtaagtttacgtagcttgctgatttcagccattgtaacagccatatacttaatctcctatttttataattagaaacgaacaaagagtgaagtcaaagaaaaggctccactctttgtctttgattattttttattcttctacttctttaacttcggcggcaggagcttcgtccgttatttcggcaacctctgcatcttcggctttcttgcgagagatacgagttttacgttctttcttaacaggagcatcctcaccctcggcaggagcatcaactttttcagccttacgttcttccaaaccttcggcaatagcaccgcatacggcatcgagaaccacttcgatagatttcgaagcatcgtcattagccggaataacgaaatctacatcgttcggattcgagttggtatctaccatagcaaatacgggaatacctaaacgattggcctcgcgcacggcaatatgttctttcaaaacatcgacaacgaacaaagcggaaggcagacgattcaaatcggcaatactgcccaaagtcttttccaacttggcacgttgacgagagatttgcaatttttcacgcttagacaaattgtcaaacgttccgtccttttccattttatcgatggtagacatcttcttcacagccttacgaatcgtagggaagttagtcaacataccacccggccaacgctcgataacatatggcatattcacagcagaagccttgtcggcgacaacttgtttggcttgtttcttagtagcgacgaacagaatttttttacccgatttagcgattgatttcaatgcagctgcggcttcgtcgatctttgctacggttttatacaagtcgataatgtggataccgttacgctccatgaagatataaggagccatagcaggattccattttcttttcaagtgtccgaaatgaacaccggcttccaataactggtcaaaattagtaatagacattttttctttgtttaatttgtttacattctacttacacaaccacaaggtagttccctatgaaaagaaaagtccttgcggtttggatactaaacacaaatatatcttcggcgtcaggccgtcgcatattaacgtttactgaactggaatctcttacgagctttgggacgtcccggtttcttacgttcaacggtacgcgggtcacgagtcatgaagccctccgatttcagagcaggtttatcctcgggattgattttcaccaatgcgcgggcaatcgctaaacgaagagcctcggcctgtcctttgaaaccaccgccattcagattcactttaatatcatacttttctgcaacgcccaatttttcaagcggttgctttacaatgtattgaagtattgaagaggggaaataaacagccaactctcttttgtttatcgtaactacacccgaaccttcgcaaacaaatactcgtgctactgcggctttacgtctgcctaatgcattaactacttccatattacttatttaagggtgttaatatctattgttttaggggtttgtgcagcatgtggatgctcgcttcctccataaatataaacgtttctcaacaattgagcgcccaatttatttttagggagcatacctttcagtacacgtttgaataatctcgattctccttttttcatcaaatcggcaggagacaattctctttgaccaccgggataacctgtaaagttcaaataaacccgatccgtccattttttccccgttaattgcaccttatcagcattgataataattacattatcgccacaatccacatgaggagtatagcacggtttgtatttaccacgcaatattttagcaacttttgcacacatacgacccaaaacttgatcggttgcatcaaccacaacccattcttttttaacggtcgctttgtttgcagaaatggtcttataacttaaagtatccactgcttattcttttaattattaaatacttaacatacacatagcattcatgcttccggccaaagaaggcatggctactattcaaattttctcaaatttgggtaataatcggactgcaaaggtacgttttttatttgaaaaacaaaagatttcgatttttcttttacagatttaaacaaaaaaatcggtccggaaaaccgggccgatccattatcagaaagtatctttatttcaccagaactttcgttgttctattcccgactttcacaatatagaatccgggtaatagatcatattggttctctcctaccccgacagaatcttccaataccgacattcccgaaatagaataaatctctatcttagaaggaacctcggcttgcacatacaactttccatctatggcataaaccttagcaccagatgcagaaagtgaatttacccccgaagggatatattccacgatctgccggtccgaaaattccgattcgactaaatcatcgcccagcaaacgataggccgatacctcataaccgtatttatactgtccgcattgcaatccggtaaaggagtacgaagtagtttcggagtccctcacaataacactgttttccaatctggacacctgagcacccgctttcaacttttgtttaacgacaatattatcgataaagaaaagagcaccgccatcggtagcgaaacggaggcaatctttttcaataccgtttttcatttccaccgtaaatgttttagactccgatttctcgaaagtcagtgttttagtatcgttttcagagtagatatataaatcggtccaaccgctcgaaacctttgcccatgctgtcactgtcacttcgaatacggtatcgttattcagcaccagttcgggtgtttgaagagtcgcctgccaaccataccctccaagcataccgtttgccaaacgaagtccgccgctaaataaccaattgggcaataaagtataatcatctagaatcacaagagaactcgactcaaactcgtctggattttctggtgtagccaaagtcgttactttcgaaaaatcttcttccaaaacgacatattcttcgtcttctctcgccgtataaacactataattattcactctatacccctcggccttaggtgttttttcccaatgtgccgtgtatgacgattctgttacatcggtagcggcagccacaacaggagcgaccaatcctattacagcgatttcgtcagatggttcagactgcactccattttccgaagaagcctttacataataatagtaatccaaattctcgtctaagccttccacattataagacgtcacactccctacattcttatcttcgaaaacatatacattttctctgacaggcatacaactgtaagaaatatcatcgatagcgacacgtccgttattcttctgttcgaaccatatctttacccgataacaatcggacggtagagaagaggtaagatcgatatagcgccccgtttgaagcgaagaagcaaaagaataacccaagtccttccactctactccattaaaatattcagcatgaatttttgagctatttccagaaagcatagttttaccccaaaacgaaaagctatccataggatcatcttccaacggagttacgatagagtctcccgtagcatcaaatgccaatgcaaccgaagcagaactgtaattgccttcatctgtatacacatgacgagtcccatgagtaacgacatcgacaacccaaccttcgggatattgaggattatcagagctaatcaacgagtcggtacaattaacggtatcgaaagtctccttcactgttttcggagccttcccatcaggaaatcgtttactatacacgctcaataaatagtctttggctcgctcgctgctttcccaatgagccgtaaacccctcccgcgtaagatcagtcgcttccaacgatttaggcgtaggaataatttcttttatccgaacaatctttatatcatcaattaaaactttgtcttcatcaccagcagaaaactgaataaaacaacggtcaaaagtaccttttttaaactctcccgtataggtttgccagtcagtggtaagtgtatgtgcataagaatcgatagtgttataaccttcacccatcactacatttattttcgattgatccccctcttgcagacgagctcgaaaagaataagtaatcacccccgaataatcccccttaggcgtattcaaataaccaccttcatagaaataataattatatacaggagctatcgcacaaattcccccagcctgaaaaatacccataccagaccaacccgcttgttgggtatattgggcatcgattgcgccagtactttcatctgccaaatcctgttccgtaggagctgtttcagccccctcgacaaatttggaaaaatcctcgttaatcaatacgaccggcgtcgattccgaaacaacgatcgccgacacattcacagttaataaaactacgaataaaatacaaagtaaacctcttttcataaactaaaatttatagtgaattttggatttttcaaaaaacaaatcgaagagcacggatataacccaaagctcatctacactaaaacgagaggttacaaatgtaaatattataaataataaacaaaatacaacatatccattttcaaaaaatctatatattagatattatcaaaggattatgaaccgaaaatcaggggtatggagtggcgtcggggacgacggggcgaggtgaggtatttactgccggttctcttgccgtcggcggtgtaataattcacgatagccgacccgttgcggaactgcacggtgtcgggcagattcagcaaattgtatcgtatggcgacaatatcccggtcgaggtcagccgtcatatttccgttggagtcgtaaaaataatcgagtccgttatgattatagtcccgatattctttcatgtcgtatcgcccctgttctcccaccatatcggtaatctctactaccctattcccttcataaaaccagttcatctcgtctatcattccgccccttcccccattgcgatacaaatttaccatattaccatgcttgtcatattcatattcgacatgataacggccgctggaaaaatcactgcctgtcaccgaataggccgaagccagccggtcgtaggcatcataagtgaagcgatagccgttcacaatcgtgtcggtatcggtgcgatatgtccaattcatcgccgatatatttccgttataacgaactttcccatagtttcccataaagttttcgtaatacaaattctgtacaaaatcgacatcttctatccgagtgatccaaccctgcaaattataccgatatttagcatgcgtcagtcctccgtcgatacttttgctggatatccgtcccaactcgtcgtattcatatatccaatcggtagacaaagagtcgttaaccgcataatcggtgcgggtgaggcgtcccgagcggtcataagtattttctacggactccgataccgataaacgcccccgggaatccaaatgttccgtgtatgatttaagaatatttcccgaaaggtcgcattgagcataagtcatttcataatcacccgatacatgccgagtgcgtgtctgtacgggatttccatattcatcgtaataataaacggtaatcgcatatttgctcctgtccgtcaagtcgaacacctgcgtcccggtcagcaaacctttggccgaggaataagccgcaccatatccctccttactccgataggcaagctgcgaagctgccgtcccctcgatgtacaaaaaagaatagtcgtcgtaataattgaccgtgagcaaccggtaatcattggcggcaggcagcagaatcctgagggtataacccatacccggccacgcagtataactatcggcacgttcctcgacaaacaatttttctttacaatactggcgcaagtctccggggctgcgaagcggattcgcctcataagtatacagcactcgggagagggcatcatatttggttatggtccagagactttcgctctgttgattgccgtcctgactcatgaccaaccgattagccctatcgtaaatcatctgtatcgatttacaaccgggcaaacgcttccctatgcagttcccccggtcgtcgtatttatagagataggcatactgttgcaaaagagtgtggctgtcgggataattgccggtattatacattccgtccacagccatcgggggcagtacgtagcacagcctgccgtggtcgtcataaatgtagtaagtgtcataaccgtttccctgacgggtcataaccactcgacccgatttatcggtgaaactctcttgccaaattccgtcctcgtcggtttcgcgagtaacataaagagcacccggggtataccgccccactcgttgtaccccatcggacgaaattcggaaaagaacgacctctcctgccgtattgcaccgatatgcagcagtcttcgggtgagcgttccaaacagctccgggatttttcacaccgactgtccggctcaacggtgagttttcgtacaaagtctcccgatagagatatgtgtctccataataactttgagccgtctgcccgtatgtagaaggattcacataacagccgttgttccccgatacgggtgtgggaagcccttgacgatattctctcccggcctcgtcgtaactaaccgtggacagcaggtcggcgcccgttgccgtgaaacccactcgggaagtctgttcgggacgacccagcccgtcataatagaccacggtcgcaagcgcctgcgaagccccttcggcagttatccggccgtcctctatattcgccgacgtactaccgccgggaagaacgacctccacgatataattcttttcagacgacaaactcaaaggaatatcgacggcagccgacactatcgccgacatgggtgacaaaaagagtatagacaaactcattgaaaagcggaggggtcttttcatagtatcgtgattttgtgtctctccgtaaatttatgcttttttttacatttccccaaatatttcacgcctttttttcatgcctcggctccaaacgactgttttaaccctcttcaaacaaaattcgggaattattttcgaggaaagcccgatgaaacacattccccctatacatagcatgaaagccggctcttcccattatccgggaatcacccttctccgaacaatcgcacagcattggccgtggtagcctcctccacctcggcagtcgtaatatccagaatttcggctattcgctttgccatataaggcaaatacgaaggttcgttccgcttgcctcgataaggcacgggagccaaatacggagcatcggtttcgagcaatatacgcccgatgcctacttctcgtaccatatcttcgagatgagcgttcttgaaagtaacgatgccgtttatcccgaaataatagtcaccggttcccctcagcagacgcacctgttcggccgaccccgtgaaactgtggaacacccctcggaatgccggcactctgcccgactgcaacagagccaatatttcgtcgaatgcctcccggcaatgaataatcaccggcaaacccgactctgccgcccaccccgtctgcatcacaaaagcctctttctgctcctcggcataggtcttgtcccaatacaaatcgagccctatctcacccacggcgcaatactccccggagaaaagcagctctctcacctgtccaagtcgctcccgataatcggcctccaccgacgtggggtgtagccccatagccatacggcaataaccaggaaacaaatcgttcgtggcatgcatggcttgcaccgtgtcgaaatcgacattgggcaatatcactcgttcgactcccgcttcacgggcgcggcgcaccacctcgacacggtcttcgtcaaactcttccagataaatatgcgtgtgagtatcaatcatcttcgggtcgcttttctccactgcgataataatatactacgccgtaagcccggcaacggttcaaacggatttcggcagggagatcggcgtaatacgtttccacctgattccacaaatccaagataatccggtccgcctcctcgcgcaaggcatccaatcccgactgggaacgagtcgtattcagtttataattctgttgttcccgataggcttccttgaaaatatcgtaatgcacggtcactttcgcgatcgtagggttataaataggtgcgcctccgtgcgacacccgttcgcgttccccctcgatgagacgttctccccaaacgagaatgtgcttctcgccggtcagctcgggcacggcaaaatcttcggggtcgagcccgtaaaacaacttgtgttccttacgcacctcgttacgcaacaccgccaaattaagcacctgtatgaaatgcgagatgtacaaccgggccgtcttcaaatgcgactgatattgtcggttggcctcggcctgagccgtatagcaatactggaactgctcgacggcacttttgaaacgtctcaaaagaacgcgggcctcgttcagcgttttatacgaagccgcctgcttgtccacatcgcactcgtgctccatcgccaccgctttttcgagagcggcaaggcgggctttgtctgtattcggtaaccggcggtaaggcattgtttctgaaaaattttagtgatctcgttttatcaatgaattcgccaaatcgtataagggctgctttgccgcttcgtccactccgatttgccgcaaagcctctatcgcccgacgactgtattcgtcgacctgccgcagacacaaatcgcctgcaccgacacggtcgtacaacgccgtcacagcagctatcttctcggaaggatcgtattcggctgcgctcaaccagcgggacaactcctcggcatctttcccttcaacccgttgccgggcattgatgagcatatacgctttcttgttattcagaatatcgcctcctatctttttcccgaaacgggcagggtcgccatacacgtccaaccaatcgtcctgcaactggaacgccagtcccaaagactcgccgaaacggtagatacaatccgcatccgtctcgctcgctccgcctataatcgcccctatcttcaacgctccccccaacagcacggctgttttcaggcgaatcatctcgatatattccgcttcggtcacatcgtcccgacgctcgaattccatatcgtattgctgaccctcgcaaatttcaagagccgttttcaggaacaactcgacgacagcccccgtgtgcggagcctctgtgcgggcgatataacggaaagcgatgatctccatagcatcgcccgaaagtatggccgtattctcgtcccacaccttatgcaccgtgggtttaccccggcgcacgtcggctttgtccatcacatcgtcatgcaacagcgtgaagttgtgaaacacttccaaccccatcgccgcattcaatgcccgacgataatcgcccgcaaacatctcgcaagcaagcaacgtcaacaacggcctcacgcgcttaccgcccaacgacaactcataacgcacgggagcatacaatccatcgggttcggcggcatattctatcttcgaaagttcagcttctatcgcatcgaaatatctttgcagtttttccataaactacttgaaaatttttatgttttacatagaacagagttcaaaattaacgatttccatcgattcgagcaaacataactcacaatataatacgaataaagttccgatacaaactcgttccgccacatactttattgtcctttttcccgttaataaatcatcgggaaccattctgccgaaagcaaaattcaatcacgcgactttctgccgaccgggaattttggctatctttgaaacccgaaaacaattatgacacatacgtttcgatatataacggttcttctggcgactgtcactacatgcttcgccgggaggggacaagaggggaaaagctcgttcgactttctcaatatccccacctctacccacgcctatacgttgggaggaaccaatatatccgtcatcgacgaagatataaacctcgtcaatcaaaacccggctctgatgggacccgaatcggatttacaactcgggctgaactacatgaaatacgtcggggaaatcaatctggcaggagccactttcggaaaggcggccggagaacggggagcatgggcggccggcatacaatactacgggtacggcaaaatgaaaagtgccgacgaaaccggcgtgatcaccggtgaattttcacccaaagacatcgtcttcaacggtatctacgcccacgacatcaccacgaccttgcggggtggagtcaatgccaaagtcatctactcctcttacgaacaatacacctcttgggcgcttgccgtcgatctcggcctcaactactacaacgccgacaacgacctctcgctctcgctggtagcacgcaatctgggtggacaaatcaaacgttacaacgacactttcgaacgcatgccgttcgatttgcagataggctatacgcaaagcctcgaacatgcgcccatacgggtatcggtcaccgctcgtaacctcacaaggtggaaacttccctaccccgccatcgaaagcagctcttacaccgggagcgatgaaatcgttgaaaaaagcggattcgtggacaaccttttccgccacctcattttcggcgtggagttcctgcccaccgaccgcatttacataggagtggggtacaactacaaaacccgcaccgacatgcgcaccgctcaccgtaactttctctccggattcagcataggtggcggaatcaaagtccgcatgttcggcataggtgtcgccctcgcacaacaacacacgggagcgaccacgctcatggtcaacctctcgaccaatcttttcgaattcaaaaaataaatgcttatgaataaacctgaacctcggataatcatcgccgtcgacggcttctcttcgtgtgggaaaagtacgatggcgaaagctcttgcccggaacataggctacatttatatcgacagtggcgcgatgtaccgcgccgtcaccctctactgcctcgaccacggtctcatcgacggcgacacggtcgataccgatacgctgaggtccctcatggacgacattcaaatcgatttccgccccgatcccgaaacgggtatgacacacacattcctaaacggaatcgacgtagagcgtgaaattcgctccatgcgagtatccgacaaggtaagccccgttagtgccatacctttcgtgcgcacggcgatggtcgccgcacagcaaaagatgggcggacggaaaggcatcgtcatggacgggcgcgatataggcacgactgtattcccccatgccgaactgaaaatattcgtcacggcctcggcggagactcgggcacaacgacgcgtcgacgaactgagggcgaaaggtatcgatgtcgatttcgacgaagtggtcgccaacatcaacaaacgcgaccacattgaccagacccgtaaagaaagtcctttgcgcaaagccgacgatgccatagaactcgacaattcccacatgacaatcgccgagcaggacgcatggctcatgacccggtacaaagaaaccgtcaaaaaacttcgataaaccacccgcaaaggtagaaaggagacaggttatggcacgcatagaaatagacgaacattcgggtttctgcttcggtgtagtcacggctatccgcaaggccgaagaagaactcgaccgcaccggacgactctactgcctcggcgacatcgtacacaacagcaacgaggtggaacgactcaaagccaaagggctcatcaccatagaccacgagcaactcaaacagttgcacgacgtgaaagtattgctgcgagcccacggcgaacctcccgaaacctaccgaatcgccgccgagaacaacatcgaaatcattgacgccacctgccctgtcgtgttgcaactgcaacgtaaaatcaaaaccgcatacgattccaaccctcccggagaggcgcaaatcgttatctacggcaaaaccggacacgccgaagtcaacggactggtgggacagacccacggcaaagccgtcgtcatcgagggagacaaagacctcgacaagatagacctccgcaaaaaactgttgctctattcccagacaactaagtcggtagaaggtttccgccacatcgtcgacgagataaaacagctgaaacccgatggacaattcgaatcgttcgacaccatctgtcggcaagtcgccaaccgcattcccaatatcagggagtttgcccgccgacacgaccttatcctgttcgtttgcgggaaaaagagctccaacggacgggtgcttttcggagaatgcctgcaagtcaatccccaatcccgactcgtttccgacatcagcgaaatagaccccacatggctcgaaggaaaagagagcataggtatctgcggagctacctccaccccccgctggctcatgaccgaagtccaagaatacataacccggttattggaaacgaccggctctactgccacccgatgaccgaccgtatttctgtgaatacccaaaagcaagcataatccggctcagcccggataagtttacttcgatactctacacaaaaatagattctacccctacctttcattttggtaaatagtttatcaaaatgaaaggcatttgcgctccgaaaaaccgactatcaccataataatcaacaatttaatcatatccccacaaaaatggtctgccatttgtcgtgcaagagatatgaaactctacatcatatcaaacagactgccggtcaaggtaagcgaaaaaaacggaacgttttcattcacccgaagcgaaggcggactggcaacggggctcgattctcttcaaactgcttacgaaaagcattggatcgggtggccgggaatttgtgtggataatgatagcgacaaacaagcgatcggggaaaaattggaagaactaaactttcaccccgtattcctgtccgacacccagataaaaaattattacgaaggttacagcaacagtaccatctggccgctgtgccactatttctttgcctatacattgtacaaggacactttctggcaagcctaccgagaagtaaacaagcgattctgtgaaaccatctgccggctgataggccccgaagataaagtatgggtacaggattatcaactgatgttattgcccggtatgcttcgagaagccgttcccgacttgtgcataggctattttcatcacatacctttcccgtcctatgaactcttccgcatattgcccgaacgggccgagattctcaaaggtctgttaggagccgatttcatagcttttcacactcacgactacatgcgacactttatcagtgcggtagaacgcgtgctgcgcatgaatttcaaattggacgaaatacagttaggcaatcgggtcgtacgaatagatgcccttcctatggggattaattacgacctgtaccacaatgcttctacacaaccggaagtccgtcaagcggtcgaccgcacgagaaaactgttcggagatcacaagttgattctctccgtggaccgcctcgattacagtaaaggaatcctgcacaggctgcgaggcttcgccgccttcctcgaacatcaccccgaatatcatggcaaggtcgctttggctatgatcatagtcccctcgcgcgaccacgtaggcagttacgcccaattaaagaccaaaatagacgaagaaataggctccatcaacggggcgtattctacgatggattggactccggtatattatttctatcacggattttctttcgaggaactgacagccatgtaccacatggccgacatagcgcttgtgacacccctccgggacggaatgaacttggtagccaaagaatatgtagccgccaaaagcgaaaatcccggtgtattgattctcagcgaaatggcaggagcagccgtcgaattgaccgacgctctgttaatcaatcccaatgacacgggacaaatcgaacgggcaatttgtcaagcattggaaatgcccgtagaggaacagttgcgacggctgcaaaacatgcagaaaatcatctcgacccaaaccgtcgacaaatgggctgccgactttaccgacgagtggaacgatatttgccgcaagaacatctccttccgcaaaaaacagattacagcaaacgcgataggcactatcaaacaagagtacaatagagcgaaaaaacggctcattcttttggactacgacggaacattggcggctctcaaaccccgccccgaagatgccgagccgacacccgaactcatagaaacgctacaaaaactttgtgaagactccgacaaccacatcgttatcaatagcgggcgcgatcatttcacattggaaaaatggctggggaaccttccggtctcgatagctgcggagcacggagcattctatcgggaaaacgggctatggcacaaaaacatcaacaaaccggtatggagcgcaggtttgttatctatcctcaaactattcgtagcgaaaacaccccgttcgcgtctggaagtcaaagaaaccgctatcgcatggcactatcgggaaagcgatgcttggctgggaactttgcgtgcccaacaattagccaacgaacttgtttctatctgtatacaacagaaattgcaaatcattcagggagacaaagtaatcgaaataaaatcgcccgactacaacaaaggctcggaagtttcccgccagctcaaaaaagaatattacgattttattttggctatcggcgacgacaccaccgacgaagatatgttcaaggccctgcccaaaaatgcggcaaccataaaagtgggttacgtctccgaaaccgccagatacaacttgccatcgcaggaacaagtcctccccttgttgcaaacattggtaaatatttcgggtgagtcatcgaccaacgataaagtccgaaaaggattgaactccgcattacatttctttaaagaactactaaacttaaaataaaaccgatgaataacctcaactatggtgtaattggaaactgccggacggcagcgctcatatcagaaaaagggaatatcgaatggttgtgtttccccgacttcgattcgccctctatcttcgcggcactgctcgatagggacaaaggcggttgtttcggattcgaagtgtcgaacgaatatcacatctcgcaatcttatgtacctcataccaatatactatccacccatttctcttccgacgaaggagaatttgtcgtgctcgacttcatgccgtgctaccgttcctatgaaaaagagcactatctgcccgcagaaatatatcgttatatccgttggataaaagggacaccccggtttaaagtaaattacaatccggctcccgattatgcacggggaaaagtcatacacaacattaccgacgaatacatcgaaacttattgttcgtccgagaacaaagaccgacaatacctatactcttccctgtctttacaagacatcgaacaaaaaaaggaaatcacgctccaacgagatgaatttttcctgctgtcatacaacgaaaaggtgattccgatagacattgaacgggaaaagctcgaatattgccgcacattggtctattggctcaactggacaaaccggactaaaaaatactcgctctacaacgacgttatagaacgaagtctgttagtattgaagttaatgtcttattacaacggagccgtattggcggcactcactacgagcctgcccgaaaccgtcggcgacgtccgcaactgggactatcgtttttgttggttgagagatgcatccatgtccatcgagaccctcttccaaatcgggcatgcaggagcggctcgcagatttatgaaattcattcaatccaccttcgtcgccaagcacgagtcttttcaaatcatgtatggcattcgcggagaaaggcaattaaaagaaatcattctggaccaccttgacggatataaaaactccaaaccggtgagaataggaaacgatgcctatcaccaaaggcaaaacgactcgttcggttatctcatggacttgatctaccaatactatcgactcatgccggggacgttagacgagatagaagacatgtgggaaatggtgaagagcattctcgccacagtcgaagaggaatggagagaaccagacaaaggaatctgggaaatcagaggggaaagccagcatttcgtctcctcgaaagtaatgtgctgggtcgctttggatcggggaacgaaaatcgccaatatgctaaaaaaatacaaatatatcgaacgctggcagaaagaagccgacaagataaaaaccgatgtgatgacccacggctggaaagaaaaaatccacagtttttcccagacctacgaaaacacggccttagattcctccctactcctcatggagccctacggcttcatcgaagcgaacgacattcgttatcaccaaacagtgaaagccataaaaaaagcgttgttacacaaaggcttgatgtaccgatacaacagcaaagacgacttcggactaccctcctcggcattcacgatatgcaccttttggctcgtgagggctcttttcgtcataggagaaaaagaagaggcccgctgcctgttcgatgaaatactgaaatgctccaatcacttgggtctgttcagcgaagatttggacttcgacaccaaagaacaattagggaatttcccccaagcctattcccatctggctctggtaaacacggccattctatttgcagaagaagacaagaaattatcgttcattcgaccctaaaaaaacagaaaagaggcggtattacgaaaacatttcttcacaatatcgtcatctctactgtaccggtatttgacttttaatttctatatttgcccaaaaagcaaaaataggagaaggtgcagcataaaattagcgcaagctcttttttctacattcacctttcactatctttgctatcaattaaacaatataggttatgtcgcaaattaaatgtgtaggtattttaacttccggtggcgatgctcccggaatgaatgcggccattcgcgcggtaactcgtgcagccatctacaacggattcgaggtaaaaggtatttatcgaggttataaaggtttgattacgggagaaataacccctttcaaaacgcaaaatgtaagtaacatcatacagttgggaggtacgatattgaagacagcccgctgtcaagaattcaaaacgcccgaaggacgaaaagtcgcttacgacacactcgtcaaagaaggcatagatgcccttgtcgtaatcggaggagacggaacattgaccggtgcgcgcattttcgccaccgaatacaactatcccatcgtaggattgccaggaacgatagacaacgatctctatggaaccgacaccacgatcggatacgatacggcactgaacaccattatggatgccgtcgataaaatacgcgataccgcaacgtcccacgaaagacttttctttatcgaagtcatgggtcgcgatgccggattcctcgctttgaacggagccatcgctacgggagccgaagcagctattattccggagatttcgaccgaagtggaccaactcgaagaactcatcaagaacggattccgcaaatcgaaaaacagtagtatcgtgttggtagccgaaagtcccatcaccggtggagccatgcacttggcagaacgggtacagaaagagtacccgcaatacgatgtccgcgtaactattctgggacacattcaacggggaggttcacccacggcgcacgaccgcattctggccagccgcatgggttcggccgccatcgatgccctgctcgaagatcaacgcaatgtcatgatcggtatccgcaacaacgaaatcgaatatattcctttcaataaagctatcaaaaacgacaaacccatagaccgagaattactcaacacgttgagaaaactctcgatctaatcacggggaacaaaaaatttcattgcacggggctgcctgattttattccgtcagacagccccggttttattgggaaaagaccgacctacaccctcacccggtccaatgggtcgagcaacttgtaaagcaagaaaaattttggcttggtagaaattcagaagtgatttttatgcagctaactcctctctccccctgccgtgtcccgtggcattacgaggtggcacaaagtgccggaggggttggcaaatactggtagtggagcgaaataggagagaagtgttattactcccccggtaacgagaatagaattgtgcattaccttccactcctatgtttattacttcctgtaattacaatcatgtaagtggtcattaacaaatcctgttgattgtaaaaaggcatagcaagtagttgtcccaaaaaacttgaaccctctttttttcatatctttgcttattgcatctgattcgggtgagcaagaaggtatttcgctcagtgagtgaaatgtatgggttattggctgattatcggggaagaatgacaatatgtagttaaagaaactcccaaattctttttgaatggcgataaataatcttgcatttgttattgccgatttgattttcaacctgttttttataattccgtcaaaatgcattaaccgttcgacatcttcttcggtcatctgtgctactgttgcaatttcgaaattatgaaatgcggcacgatagccttcgcgtttttttaatattgttatccaacttagtccggcttgggcactttccaacaagagaaattcgaataatatcttgtcttcttttactaatcttccccattcattatcgtgatatgccacataaagttcatcagtaccacaccaaccgcaacgtccatttatcaaattttgcatatgattcaaaaagattattcactaatttacaactctaattacaacaaaagtatcaataaaataccatctatcaattattcgcgaataacattttgttatttttgatgtatgattataattatagttttgttcacacacctttacattgagactgaacgggacaatgttataggttgtagcttatcgcactgctcttcgaaccattcaaatatggactgacggttaatcacagaaactaattttggcttgtcagtaggggctttcaccacttgaaatcctgccttttcggtcttgaatttctatctgtgtacttccgaatagagttttctctcatactctatgtcttatcctagacgagtgttacagtccacctaccgaaccgctcgtgtgtatttttttacagaactttgtgaactttattcgtcccgaatgaggtacgtgaaattcgataggggagatgtcatgcagagccggagtgggtgaagccactcaaagtaacgtttcaatcctctccccctaccgtgtcccgtagccttacggggtgtcgcaaagcgatagggggaggtggcacgacgtgacggaggggttagaaaatacaagtagggagaaagttagaatgtttttctgaaaagaaaatcgacaggttcgccacaccgattcggcaattctcctcaattctcgaataaaatttgcatttgctcccgacttgttttatctttgtttttcttagatttcgaactatggaaacgtccgatcaacaatacaccaacgaagagcaacttatcgaagataaatttcaagaactgctcaacggatatctcaactccaaccaccggaagaaagtcgagattatcgagcgtgcgttcaaatttgccaaagaagcccacaagggaatacgccgacgatcgggcgaaccctacatactgcaccctatcgccgtggctcgtatcgtcagtcaggaaataggtttgggctctacatcgatatgctccgccctgttgcacgatgtagtggaagacaccgaatataccgtcgaggacatcgagaaccacttcgggaaaaagatagcatccatcgtcgacgggctcaccaaaatatcgggcggtattttcggcgaccaagcatcggctcaggccgagaattttcgacggctgttgcttaccatgtccgaagacattcgggtaatcctcatcaaaatggccgaccgtctgcacaacatgcgcacgctcggttccatgcttcccagcaaacaatataaaatcgctggcgagacactctatatatatgccccgttggcccaccgtttaggattgttcgccataaagaccgagttggaagacctcgccttcaaatacgaacaccccgaggcttacaaccaaatcaagcagaaaatcgccgagagcgaagaatcgcgccaacaaatctacaacaacttctccaagccgattgtcgcgaagctcaaagaaatggggctcgaattcgagatgaaagcccgggtaaaatccatctattccatttggaacaagatggagtcgaaacacatacctttcgaggaagtctacgacctctatgcggttcgtatcattttcaaatgccccaacgaagccgacgagaaaaaagagtgctgggccatttactcggtcatcaccgacatctacaaactgcaccccgaacgcacccgcgactgggtgagccgccccaaagccaatggatacaaagctctgcatctcacggtcatgggtcccgacggcaattggatagaagtacaaatacgaagcgaaaaaatggacgagatcgccgaacggggattcgctgcccattggaaatacaaagtgggaaactccgacgaagagtcggaactcgacatctggctgaaaaccatcaaagacattctcgaacaccccgagcccaacgccatcgattttctcgacacgataaagctcaacctattcagtaccgagatatttgtctttacgcccaaaggcgagctcatcacattgcccaaagacgccacggcactcgatttggctttcactctgcactccgacctcggcttccactgtatcgccgccaaagtaaatcaccggctagtaccgctgaaccaaaaactgcatagcggcgaccaagtggaaatactcacctccaaatcgcaaacacccaaagaggaatggctcaacttcatcaccacggccaaagcccgaagcagactgacggcatcgttgcggaaagaccgtcgaaaaatcatagcgaaaggagagaaaatactgaaagaattcttcgaaagcagtcacatcgaatacaacaacgatgtagttaccaaaatattaagcaacctcggcatacgacatcgggacgatctgttctacaaaataggaaatgacgagataacccccaacgaaaatatcaaaaagatcatcaagggcaaaagtcaaaatcccttcatgcggtatctgaaactttcgttcggcagcaacaacgggaaaaacgaacagcccaaacccgtcactcctcagcaacttacgatagaccgcaaacagacctacattctgcgagacgaaaacggagtgaaaaactataaagtagcggattgctgttgcccgatacccggtgacgacgtcttgggatatgtggaagacgacgagaccgtagtcgtgcacaaaagagaatgtcccgtagccatgcgactgaaatcgagcttcggcccacggttggtatccacgcaatgggaagccagcgaatcgctctctttcccggccaagatagagatacaaggtatcgaccggataggaatcctcaacgaaatcacccgggtgatttccaatgaattgattatcgacatgagaggactcaccataaaagccaacgaaggtgtattcaccgggacggtcaacatcatggtgcacgacacccgcgtcgtagaatcgctttgtaataaattacgtaaaataaagggcgtacagaaggtcgcacgctgtaaagaataacccgtagaatcatggataaaaaccgtatacaaaaattcctgtccagcacacgtgtcctgcaatttgtctttttcgtggcagcagtgacattggttacctatttcttcccgagagaaggaaaatttcgttacacctttcaggaagggaaaccgtggaagtacggattgctcaccgctccgttcgactttcccgtttataaagacgaagccgtcattcaacaagagcgcgacagcatcatgctcgacttccagccggtattctcacacaacgaatcgatagagaaaaagtccgtcgacgacttcgaaaaagcattgagtaactatacggaaatgtctatcccgccgactctccgcaagaacttggtccaagctctgcgagaagcctatcggaaaggaatcgtctcttccgaagcatacacccggctgcaatccgggaaattcaaggaaatacgaatcctcgaaaacaatgtcgcgcgcgaaatgccggtatccgaactgcaatctgcacgcgaagcctacgaaaacatgctcaataaattccccgactcctactcgcatcacatcttacaaacctgtaacctgaacgattttctaaacacaaatatcgcattcgatagtattacgaccgaccggctcaaagacaatctgttacaacgaatcgctctctccgacggtattgttcaagccggagaacgcattgtcgaccggggcgaaatcatcacgccgcaaacctatcgcattctcaaatcgctcgaaaccgtcaccttgaaaaaaagcgtcggcaatgaccaccgtggttacaccatactgggacaaatcatcgtattcacctgtctcttttcttttttctatctgttcttggcactgttccgtccgcagactttcaacgagatgcgtaccctcggctttatgatgatgctcatcgtgggcatctccctgatagcttttttcctttctgaatttcggttacaaggcatatatttggttccgttcgccattattcccattatcgtggtcaccttcttcgactcgcgcaccgcactctatgtacacctcattacggtacttatctgtgcttttacggcgccgttcgcactcgaattcatcttcttgcagcttatcgtaggcatgaccgccatcgacagcctcagcgacctttctcgccgctcccagctcatgcgctgcgccctgctcgtcttcctcgcctactgctttgcctacgtgggatatacactcctttccgaaggcgacctctcgaaactgaattacaatatgttcatctatttcggagtcaattgtgtatttctgctgttcgcctatctccttatctatatattcgaaaaggccttcgggttcatctccacagtcacgctggtcgaattgtccgatgtgaacaatcccatattgagacaattatccgaagagtgccccggaaccttccaacactccctgcaaatctccaacttagcggccgaggcggccaataaaataggagcgaaggctcaattggttcgtaccggagccctttatcacgatatcgggaaactcaaaaatccggcattcttcaccgagaatcaatcgggattcaatccgcacacaccgctctccttcgaacaaagcgcacaaatcgtcatctcccatgtgaacgacggacttaaaatggccgataaactacgattaccccaagctatcaaagactttatctccacgcaccacggacacgggaaagcaaaattcttttacaactccttctgtaacaaataccccgaccaacccatagacgaatcgaaattcacctaccccggtcccaacccgttcacgaaagagacgggaatactcatgatggccgatgccgtcgaagccgcttcgagaagcctcaaagaatacaccaacgaaagtatctcgcaactcgttaaccgcatcatcgactcgcaagtcgccgacggcctcttgcgcgatacccccctcagcttccgcgatgtggagacgatcaaagctacctttatcgagaaactcaaaaccatctatcacacccgcattagttatcccgaactgaataaaaacgggaaagccgaggagaaaaaaacagacaaggaaacaacaaaagcagacaacaatgctccctctccaactgaaataaagaaataatcgataaaaattctattcctctttaacaggctgtcaaaatatcattctcgttagacgaacttatgaaaataagcaaatgataggaacaacatataatccatgaaacaatacgaagcagtcattgaaacattagataaattaggtggtgtagccacattgggagacttaaactcagaagtttttaaaatccaagaatgtgaatggaaaacaaaaactccattcgcatcaatcagacgcatagttcaacaaactaagggtatttataaaatcaaacccggattatatggccttgaaaaataccgaaaacaaaacgaagaaagaggaattattcctgaaacagaaaagaacaaagactccgaaatacagagatcgttcaatcacgcttactatcaaggcctactggtgataataggtaatttgcgtaatctgaaaacgtttattccaaaccaagacaaaaataaaaaattttacgatgggaaaacgcttcaagaactctctacactcaaaaaattacccaattactcctaccccgcattaataaatcgaagtgcgatgattgataccatttggttcaatgaacgcaatatgcctcattcgttcttcgaaatagaacactcgacagatatccaaaactcgctcttaaaatttaatgatttgcaagatttttacgtcagaatggccatagtggcagacgccaaacgaaaatctgaatttgaaaccaaactttcatatcatgcattcgacgagttacggttaaacaagcgcgtctcttttttaagttatgaagctcttgttaaacaatatgaaatggaaatagagaaacaatctcttgattttatactataacattagccataccatagaaatcacaaagccattatcgtgtgatacaccttttcgataaaaagctcgtaatcgttaaatatcacaccattcccgaaatcattatagtcatgttctgttaatgacaaagaaggattcaacctcctataataatccatatactccctgctggtagacaaagagtcgttatcaggaatatgcacgacataaatcaaagttttgttaggtgtatggaaatagatactagcatcatcttgagaaagagtaacatatttttcggcattatgagctgtaaaagtctcccaccggctcaattctccagatcgttgataatacggtagtttatcaagtatgatgaatatttgaaaatacggacaattcccacatcgtatattggcagtttcacccaacatgttctcaaaataattgttcgagttttgcgagtaattctgcataacgaatttaaccgccaaaccggctacggcacgctcccctttcttcactgtaatatccacagccttattgacataacgtccccttatcttcgtctctttaccaattccatacccctgcgaaaaaacggtataattccggcctaacttttctgccaaatctcgtgctattgcaccgtgtaacggtttaagttttgccgtgctccgagatgtacccttttcgataaactctttgaacgaattagtaagcactctcaaaaagtccgagttgcccagtggataagttatctcttccctttccatattccaattgtatcttataatttatatatagttccaagtctttcgaattgaaggtataatatccaccgcttttataatttttgagtagcgaaacgtaacgaataaattcctcgtttctaataatcctatcgagcatatcgaatgtaacccccttatcaggcaatatatacaaaccgctatacagaccacaccccggcggaacctccgtcaatttaatactctcaactcctttgatacaagtgttaacggcatacttcaaaatacaaacatctttcaacgcctgtgtacgcccatacaaaaaccaatcgggtgtctcacttctttttcttcctttcagaagcttttccgcatgatcctctaaataccgacatacactctcgctctccgacaaaagttcatacgcgagaggagaccctttttcatcataagggaaaaaagccctcgaccattttcctgtcgaggccttcaataccggaatcgtatactccataaaaggcaattcgccgataaacacatcgtcgaataacgtagcgaatccatttttcacccgtacatatgaatccgaagcagacagccttatccgcttcaacagttccaactccttcttaccagaaagataaaacttgcgatttatttgtatctcgtcgtatgacagcgtgtctatgtgccgtattttacccacccgttcgtcatagacattataatctatccgatcattatcttcgactttttcaaaccgggaaatcaacgtataggtagtagccttgaagggttgaaaatgtcccatatccactactcctgtcaaatactttctcaaaacaatttcacgacgcatattctcacctgccaagctattcagccacgaactcggcgtaatataacacaatcgtccacctgccgacaacatacgaagacctaattcgaaaaacaccagaaacaaatccgtcattcccccattggcaaaagtaaactgtttgacatctgtataatcggtttctaaattatgaactctcacatacgggggattacccaccacgaaatccattgtcccatcataaattttgattttcaaagcattaccttcgataatatcccaatccacatcggttacaccgaacttcaaagcaacaagattcaaattttctatgcaccgttcataagtcccggcatcgatttctattccatgtatatatgtctgtaaatcgtctttaaggagagcgatatcgtcatttcctgcacgaaaagcccggcaataacggccgacaatttcgcaaagaaatgctccctcgccacaactgttgtcgatgatgtgctttcccaatatgcggggagattccacataaccgcaaaaatccaatatatcggcgaccaaataatcgggggtaaatacttgtccgctatgttttatccgtaaacttcccatgagttgcaaagataatatattttccttttttcctgcccatcaccttccaaaacatcgtttcgtatcaccttgccataaaacggggtggaagtggcatttcttttgcagaaaattgcagaagaaatggggattgtatttcatcacgaagagattacggtcgaggagaaccgacagagaaacgaatacctgcgacggtattataaccccgagacgggagagggtagcgatacaggcgaccgccgaatattgcggttgcccgatgctcccataccagttcaatatattccgaaggctttgttcgagaacgaaataatggcgcaaagactcgtcgaatgcgggagtctggcggggtatgccgaacgatacggtcacgacaaaagaatcgctaccgacgaagcaggaagaaacccgcaactcgccgacggcggggatgccacagaagaactatggagggagtggatacgggtgcgcattcggtacgatttcgaattttgggcattcagctttgtccgtatcaaagataaattgggagccgaagacattccattccgtctgaacagaccgcaacggcgcatattgggaatgctcgaagatatgcgcacggcgggaaaacccattcgcctcatcttgctcaaagcccggcaatggggaggttccactctcgtacaaatctatatggcatggattcagctggtacactgccgcaactggaacagtgtaatttgcgcccatctcaaagaatcggccgccaacatcaagggcatgtacagcaaactgctcgccaactatcccgactggctgctcgacggggagaaaccgaagttcaaaccgttcgagcgcatggcgaacacatcggtcatcgccgggcgggagtgcagggtaaccataggctcggccgagagtcaggaatcggtgcggggtatcgacgcggcgatggctcacctctcggaggtggctttctggcggaacagccgcatgaaatcgcccgaacaggtgatgcgctcgatatgcgggtcgatcatgctgctaccctgttcgatggtggttatggaaagcacggcgaacgggacggggtcttattttcaccaagagtgcgaacgagccaaacggggagagagcgacaaacagttcgctttcgtcccgtggttcgaaatagagatgtacaccctgccgatcgacgactacgactcgttcatcggcagcctcaccgactacgaacgcatgctatggcacaggggagccacgctcgaagcaatcgcttggtatcggcagaaacggaaagagtatgcccggcatgccgacatgatggccgaatatcccagcgacgatatagaggcattctgctactcgggcgaacgagtgttcgatcccacgttggtggaaaagttgcgtcgctgctgttgtccgccgcggttcgaaggcgacattcacggcaaagaacccaccgggaaacaatccttgcaagaaatcgaattggaagctaaacccgaagggcctctgaaaatatgggaatatcccgccaaagaatgcgaaatgcgggatcgctatctggcagtagtcgatataggcggacgctccgacacctcggactattcggtcatagccgtgttcgaccgttattggatgctcgatggcggccccgccgaagtcgtggcgcaatggcggggacacatagaccacgacttgctcgcatggaaatcggctcaaatcgccgcatactatcagaacgctctgctggtgatcgagagcaacacgctcgaaaccgagcacgacgatagcgaacactcggcctatatcctcgacacgctctcccgatattacaacaacctgtatgcccgacagtcccctcccgacagcataggacagaaaccgccctcccgttggggattccacatgaatcgagccaccaaagcactggttatcgatgcccaaaagaacgcccttcgggaaggaagctatatcgaacacgacacacaagcctgctacgaacacgatgtatatgaacgcaaacccaacggcagctacggcgctatggagggtcatcacgacgacatactcatcacccgttgtatcgggaactatatatgcagtcgggaactgccgtccgcttcatcgaaaggtcatcggagcgaaaggatcgttaacgagtcgtctatataaaaaacgttctccgttacccaaacaccccttgtcgcaacaaacccctccggcactgcgtgccacctcccctatattttgctatgcaaaacacagaggaggaggtgaatactttccgacatatcgtgtttgtccttcttccctgccgtgtaccgtagcattacggggtgtttcgttagcaatatagagaaggtggcacgtagtgaaagcatcttcctttacaaaggttagggaaaacggcactacttgccatactctgcaatactgtgggatatccctcagtacaaaagacgatagaccatacattttgtttacctctatcgagttttaccaaacagccatagaaaaattttgatttgtcagatagatattatttagaattgatataaataaattttactatttatttccgttccaaactaacatatttccataatatcacaaataataaaaactttttgaaacaataaaaacacatgtcgcataaaataatttttatttttgtttaaaatcatatcaatcattcaatttaaaataattagttttgcacctcgaaaacagaataaaggacgttcgacaggttacacattcggtgaaaacgggaataaagctcataggatttatcttactacttggcttgaattttcaaggcatgggacagcatcgttctcatggagaacctctacggaagggacgcatcagtctgaaattgaccgtacgtgattcccacaatcgtaacgccgtagaatatgccactcttttattgaaaaagggtaaaaatcggcaattctcaggtatcaccgacgaaaaaggttctcacaccttcttatccattccgaaaggagactatgaactgaccgtcacttccttaggttacaaatcccggacaatcgacctgcatgctcgcagagatacgactttgacaatcttactcttgtcgaacgatatcgccatgcaagacgtggtggtgaccgcctacgaatcgagaggagcaaccagtgcatcgcgtatcgaccgaaaagcgatggaacatctgcaaccgtcgagctttaccgacttggtagaactgttgccgggaaacgtctcgaaggatccctctatgggctcggccaacctgataaaactacgcgaagccggtggaacagggccgagcgactacgacgtgacctcgttcgggacttcgttcgttatcgacggtgtccccctcaacaacgatgccaatatgcagtatatctccaacagttgggaaacgggacgtaatacgaccggcaaagggatagacatgcggtccatctccaccgacgacatcgccaaagtagaaatcgtgaggggaatcccttcggtagaatacggcgacctcaccagcggactggtcaacatagaacggaaaaagggagggaacgatctcgaagcccgtttcaaagccgacatgcaaagccaactgttttatgtggggaaagggatagaactgacggataaacaatttacgctcaatacgggtatcgactacctcgattcgaaaatagaccctcgcaacaaccgagaaaacttcaaacgggtgaccggctcaatacggaccgaaaaacgatggacgaacgatcattggcgatggactttcaactccaatctgaattaccgggggactttcgaaaatgacaaaaacgatcccgacctcactccgtcgggggcaatagactcttacgaatcgtcgaacaacgccctctccctcgccggcactctatcgctcaacaatcgcaaaaagggatttttccgatcgctttccttgacggcatcagccagcggttcgtgggacaatatccaccaagaaaaaaccgtcgtgcccagcaaattgtcggtcgtgcccacggccacgcaaccgggcgtacacgacgccgagattctgccttcgacctatctcgcatcgctcgacgtgaacggcaacccgttcaacgcattcgtcaaagcgatcgccacattcaactacaattaccgcaactggttcaatatcatcaaggtcggaggagactggcgcatgaataaaaactacggcgaaggacaactctacgacatgaggcgtcccatcagcatcgatattaccacccgtccccgaccgttcaacgacataccggccgagcacaatctcgcctttttcatcgaggaagcctcgaagttgcgattgggaaaacaccgcatcgacattaccgccggcctacgcagcgcatcgctgttaaatctcgataaccgttacgtcctcgatggaaaaatctatctcgaccctcgtgtaaacgcaaaatgggcattgccacgtatcggcgagagaaagccgttgagcatagaactatcgggcggagtaggctggcacaccaaaatgcccgacatttcgaaactttatcccgaccttttttactacgaccttatacagctcaatttcttttcgaacgaaaatccggccgtaaaccgcatgaacgtccacacatttatcgacgacctgaccaactacaacctgaaagccgcccgaaacatgaaatgggaagtgcgtgccgatttttcgatagacgaccaccggttatcggtaacctacttccgggaaaaaatgacttcgggattccggcagggaaaatcctacacccggtatatttataaccgatacagtaccgaggggctggacccatcgacgatgacagggccgcccgacctcgccgacctgacgtttacccccgacacgatactgaaagtacaaagcgtccacaccaacggaagccgaattttgaaagaaggcgtggaatttcaatactcctcgaaacgatttccgataatccgcacgagactgacggtaaacggagcgtggttccgcacgacctataacaacagccagccggtatacaaacgcccctctgtcgttatcgacggtcgacaaatcagatacataggactttacaacgaggacgacggttatattcgagaaagtttcaataccaactttactttcgacaccgatataccgcggctcaaactgggattctccacatctattcagtgcatgtggttcacatcgagccaaagcatgtgggaaagcggggttcccatcgcctacgtcaatatggagggcgaactccttccctacactgatgccgaacggaacgacatgatattgcaacacttggtggaaccgcactatgaaaacaacttcaaaaaacgtacgattcccatcgatgccaatataaatatcaaggtcacgaagaaaatatgccgggataaaatcgcactggccttatacgtcaatcggttggtaagctatcaccccgattacacgttgttcgggaacacaatccgccgtacttccaatccctacttcggcatggaaatcaatttcagattatagaaccaattaaaaatcaaggcattaaaaagagaacagatttacaaacgaatttaatatacaataaacattcaataaaaccattatgaaactgaaaagatttttttcattcctgttgttcgccgctgtaatcacggtgttcaccgcttgcgacgaagacgaagacacttccgttcccgtcgacgtaaccctcaactttacggctccgtcggacacgatcacctcgttcacatgggccgaaggcaaggccactttcacagacctcaaccgtgggaaagaatacgagctcgacctgtcccaaagttccgtcatcacactttcttcgggactttataacatcacggtcgaaggagccatcgccagcgcttcgggcgaaatcctttgcaatgtacgcagcacgaaagacaacgtacaaatctctgccccatcgacttcgatcgctttggatctatcgatctacactccaagcaactcccttattctcaaagagatttatgtaacgggaacagccaatgacaaagggacttccagtctctatgacaaatacttcgtcatctacaacaacagcagcgaaaccgtctatgccgacggagtggccttgctcgaaagcactttcgggacgactgagaaataccaatacaacgacaacccgcaaccgatgacgaccacgtttaccgcagccgccatctatgtcattccgggtaacggtacggaacaccctctcgctccgggtgaacaactcgttctcgcagatcaaggctacgatttcacacagaccaaagccgatgccatcgatttgtcgatcgccgatttcgaatggtatgacgaaaccgaaaaaggcatggacccggatatagccgaagttcccaatctcgacaaatggtatagctactcggctaccatctggatacctaacaaccaagcgaaccgcgcttacgccatcgcccgcatgggagtgtcgaaagacgaattcctcgccaactattacaaagaatatcattatacggccacgaacggtaaagagatgaccaaaaagggttatgacgtaccggtagcatgggttctcgatgccgtcaatctgggaaataccggcttcgaaagaatcgctacccccgcagtgctcgaccgcagttatgctactaccggaatcgccgggacagacaaaacccgtttcggacggtcgtttatccgcaaagtagcttcttccacaggcagctatacggtttaccaagataccgacgactcggccaacgatttcacctttacgactccatcgttgaagaaataatcttaacagacatcggtcgtcatgaaaatacgtttctgttcttttctaaccatagcactctttctgctccctgctttgcagggggcggaaagagactctttgtctttgcttcgcacgattgccgagtatgaagccttgcctgcgaaatggatagaaacggtttataccaacccggccacccaatattaccagcattgtacttctctgactcgtatctccttaaacggggtttacggaaaagaagacgaagctgccctcttgcaagccggtgacggttatctgaaaggagcagccgacgtatcgtcgtggataaagctgagcgatcgcacccgcttgtggggtaacgcccgctacacaaccggaaaagaaaccggtgtcgtatggaacgaaacagcagacttcgaactgctctacccctacgtcatggccgattccatcgggggagacctttccctgcaagaatatgccttcacgggaggatattcgggtcgagccggaaaattcacatggggtatcgaagggagctaccgtgccgcactggaatatcgaaaccgggatcctcgtccgaagaacatcgtctcggacctcgattttgccggcggaggttccgtgcgattggataaatatgtcgtgggaatatcggtcatggcacaaatatacagccaagacaacacgctcgacttttatgccccgctgggtagcgcctatatctatacgatgaccgggctgggaacgacctcggtacgattcgggaaaggcgacgtcaccgatacgaactacaagggctacggttacggagccggcattcaactgcttcccgcacaaggaaggaagggcatatacgccgcagcgaactaccgcaaatatagcgtgacccaacatctcgacgggtacaacaacctgcctttaaccgtactcgaccgcactctgctcgatatgaccgccggatattcgacaaagcaggacatgcacacagtcgggattcaagtaaaaggagcactctataaccgtaaagggacagagaacaccttcggcagtgccgccggcaataattacgaccaaataggcagcacgaccccgtacacctccgaccaaatgaaaatacaaggtgaattgctgtacggcatagaggccggaaaaagttttaaagggtacattcgcccctattacctgtggtttcacaccgatattcgtcaaaaagagaaaaagcataggctaaaaaccaacagcagcgaatatggactgaaaatagatgcaagcggcatattcgaaaaatctctactatctttatcgggaaacataggaattcgaaccggcggcaacgggaaattgtccataccgaacgtacagaaagactgcgtgcgtgaaatgctggaacataatttcaccatgttgaagacccgacgaacaaactacggaatagaattgaaatggagccgaatattctcgggctgggctttatcgatcgctgccgactggcagcagagccattacgaaaagcacggctcggccaactatgccggagtaaatataggatttaatttctgaccgaaaagaacaaacacatatagctttttatatggaaacaattatcaaatgctcgaacctcacccattactacgggtcgagaaaaatatacgaagacctcaacttcgaagtccccaaagggaggattttggggttgctggggaaaaacggcacagggaaaacgaccacgatcaatattttaatgggttacttgaaaccccgctcgggcgaatgccgtatcttcggagaagacatacagcgaatgcagccggtgacccgcgagcgtatcgccctgctcatcgagaaccatgtgcaatacacgttcatgaatatcgaacagatagagcgattttactcggctttttatccgaaatggaacaaagaagcctattatgaactcatgcgcaaactgaaagtcgcgccgaaacaaaaaatctcccgcatgtcgtgcggacaaagatcgcaggtggctttgggtctcattctcgcccaaaacgccgatttgctggtactcgacgatttctcgataggactcgaccccggctaccgccgactcttcacagaatatctgcgcgaatacgccaaagccgaagaaaagaccatcttccttacctcgcacatcatacaggacatggaacggctggtcgacgactgtatcatcatggattacggccgcatattgattcagaagcctgtaaaggaattgctcgacaccttcacacgctataccttcaaaacatcgtcgcccgacaagctcccccacgacccgtcgttatacagcacggcggccatacgggattctgccgagacctactcgttcgaaaacgaagaacgtatcaaacagatattgcaagagcaatcgataccctataccgatttcaaatccgagaaaatgaatctggaagacgttttcatcggattgaccggaaaatactaatccttttatcatcggaattatgaataaagctatatttttcaaagagtggatcaaaacccggggactgtttttcatcgccctgctggtatcgctttgtttcgccggatacgtcatgatgcgcatcaaccgggtcatcactttcaagggggccgaccacctgtgggccatcttgttgagccgggataccgtgtttatcgagttgttacaatacctgccgctcatcataggcgcactgttcgcctcgttgcagttcattcccgaaatgacgcagaaacggctgaaactgactttacaccttccttatcctcagcaacgcatgattttattgatgttgctggcgggagtcgcgcaaatcagcatcgtctttctgttgcaagccgcttccttgtggatttacctgcaacaacatatcgcctgcgaaatggtcgcacgcatattgctgacagcggctccgtggtatatctgcggttataccgcctacctgatgacagcgtggatatgcctcgaaccaacgtggaaactgcgcatcgtcaatctgctgatcgccgcaggtatcgtgcgaatctttttcctgctcgacaaaccggaagcctataattcgtttctgccgacgcttattattttcaccattccgtgcgcatcgctttctatccggtcggttgtccgattcaaagaaggttgccaagactaatttcaaaaacggtatactacaatgaaaaaattcagcaaaatatttttctacctgacggctgtcgtcctattgtcgtggttattgccgtggcttttgcaattcgcagcctccaaaccgggaaacgatcctttcacgttgtacagttgcgtaaccaaacggttcgcgtacatacaatcgagcaaggataacggggtaaaacgctacgacgcgaacggaacggaatatacagtagcacaattcgactccatattgcctaccttttattacagacagctgttctcgaaagaccggctgcccgacacaatcaacgggaaagaggtgaccccgaaaatcatcgctcacgggaatttcacattcaagcagtcggcccgagacgtgaatgtgacaaagcccgcattgaacatgattatggaatcgatgccggaccggatcgacctcgaaaaccccatcgaagctttccgcacgaccgatcgcattactttcatcgatatgcgggacaacacggtcaacaaaaaaaaatcggctttgttcgacaaagtcatgaaacaaaaagggtttgaatttcccatgcgaaccttgtcgggaaacccgacgaaccggaaagagtatgacgaggggtatctgatggtagacaacaaccaccgggtattccatgtgaaacaaaccaaaggactgccctacgtgcgtgaaacgggtgtggctcccgaattgggtatcgagcatgtagccatcaccgaattcagcaaccgcaaaacactgggattgttaacggacaaagataacaacctatatgtattgaatcgggattacacgttgcacaaattgccgatagacaaatacgaccccaagaccaacaccctgaccatcatgggcgatatcttctactggaccctaaaaataagcgacgaaagaggcgtgaccacatacgccgtcgacgctgacagttatgctttcgccgacagcctgcgctatgactacccggagaccgctctcgacaaatggtcgaaatatattttcccgtttgaactgtcgttcacatcttacgacgaccaatgggtaaaaccgcgtgtgagcatgggatcgtgctgggtactgattttgaacttcgttttggccgctttgctttattttacagcatgtaaaggtagcacatgtagccgccgtcaaaaattcataacgaccgtagcgaccatgatattgggcatatatctgtttattccgctactggtttgcaaacgggcataacccgacgattcgtttataaaatatttgctatctttgtcataccaaaaataaagaaaagatttacaaacatttaaactacaacaatatgaaaaaatccatttttatccttgcagccgtcgccttgcttgctatggtgagctgcaacaacaaagctaaggagaatcagaatcaagaaagcgccgcaacagtggctctgagcgtagacgacattttagccgaaggggacagcctcgtaggaaaaaccgttaccgtagagggtgtgtgcacccatatctgtaaacacggcggcaagaaactcttcatgatgggaaccgacgacaccaaaatgttgcgtgcagaggcttgcgaactgggcagcttccccgctgaggttgtgaacagtctcgtatcggtgacgggaactctcgaagaagaccgtatcgatgaagctaccatacagagaatggaagaacagtacaaaaatcaaagcggagagaaacacggtgacggagaagccggatgcgaaagtgaaaagaaagctgccggacaagccgacatcaatacattcgaaggtcgcatacagaacttccgagaacgccttgccaaagccaaagaagccggtaaagactatttcgtgatgtcgtatcacatcaatacgaccagctacgaaattaaaaattaactcatagaaaccgaacatgtcgaaagaaaaacgtatatcggggaaattcagaaaatggtgtcacattctgcatagggatctttcgttcttttttgcaggggtcattctcatttatgctttctctggcatcatgctgaaccacaaacgcgactttaactccgattacagtatcacacagaaagaataccgaatcgcagggaattttccgaaagcgaaagcagacttttccaaagcgtacgtgctcgatttgctcgatgacttgggtgagcggaataactatacccaacattatttcccgaaagagaacaccatgaaggtgtttatcaaaggcggctcgtcgctgacggtgaacaccgagacgggggaggcttattacgagtcggtgaaaaaacgccctatattgagcagtctcaaccgattgcactacaacccgaaccggaactggacgatcttctcggacatttttgccgtgtcgctcatcgtcatcaccctcacggggcttgtcatgcttaaagggcgtaaaggcttctggggacggggcggtatagaatttgccgcaggcatactcattcctctggcgttcattttactgtaagaccgttcgattgccatacgaagattccgtgaagggatgccgcctttcacggaatttttgtatgataagaatttctaataatctgaaaaaagcaccccgagaaacagattcatgctgtaaagcgagtatctttgtagcctatcgtggaatagactgtatctatttctgcttcctcgcccacaggccggccctttcctatgatgaagtatacagcctgtgatgtcgcaaggtgtggcaagagggaaaaaagaatcggcgatattcgctctcttgtcagtatgatgcagccacgattttcatttatttccaatttataaaaccataaagatatgagaataaaacatgtaataggaatagccttcacctgcatggtgttcatcttttcgtgccaagcccaaagctccaccgagagtcatgcaggaaaaaacaagcaagaacagaaaatcaagccccgccacttgaccaaagcggaattcctctcgaaagtggcgaactatgagaaaacgcccgacaagtgggagtacttgggctcgaagccttgcattatcgatttttacgctacatggtgcggtccttgccgaaagttggctccgatattggaggagattgccggagaatatgccgggaaaatcgatgtctataaaatagatgtggataaagaacctgagcttgccgctgccttcggtgtacagagtatccctacattactattttgtccgatgaagaatcaaccgcaaatcgccgccggattcatggataaagctaccttacagaaggctatcaaagaggtactgctcgtaaaataacaacacgccgaaagttatcgatattcaactcaccggctctacgtgacatcacactctacgttttgtcttagtggagagttcctctgctagggatatttctttaacccctccgtcacttcgtgacacctcccctatattttgtatggcaaaacacaggggaggagggtaatactttcctgtgtatcgtgtttattcttctccccctattgctgggcgacaccccgtaatactacgggactcggcagggaggagagtagaaatctttcaatacatcgctccaccgttgttttaatcttccggctctacgagccttctcgcccaatcgcacatacgtgcgcagaggaggagtgtgtgaataccctacaataccgcagggtataggtgagggggttaaaaagcattctccttttagggtggagagatagattttacacttctcccctgtgttttgcaacgcagaatataggggagagaccgaagaacaatagtttctgaggagaggggttgaggaagatagcatataagatttttgattgtagaatttaacccctcgccctacgggcactccccctatattcccttacggaaacaccccgtaatgtcacgggacacggcagggggagagaattgaaacgttactttgagtgatttcacccattccggctccgcataacatctcccctatcgaatttcactaacctcattcgggacgaatagaattcacaaagttcggtaaaaacacacacgagcggttcggtaggataaaaaagccgaacatacaacaacccatatcgcacaaagagagaatatcaagtgagaaataccgcgcctcattgcagtccaacaaaaaagtttcattcgtaaagagttatgaatgaaacttttattatatttatagccaaatacagttaagagaaaacgatagagcatatcttatatgaaatattacattgagctttttaccttattgttatttgtcggatgtataccaaatagatgctatacaatctatcaaatcgataacggtgaagactatctacaagacggaatgcgccgcattgtagacaggcaagggcgtatagggtatgtaaatgaaaagggtgcaattatcatcaaacctcaatttgcttttggttttccttttaaagacggacgtgcaaaggttacaaatagaggagaaaaaaaagtagtaccaaattcaaaaggagaatatcattattgggaaagtgataaatggttctatatagacaagaggggagtatcacttcctcaatttagcgttatggaatggatcccgacgcaagttgtagatgataaagaaaatagacaatatcggattggttttataggattagccagatggttctatttaccttatgacaactctaacgactggataatagtaaagataaaggaggccatcgaaaatatttcgatgatagaagtcacactgttaaacacaaataccattattgacgttcaacacagctataaagaacggccaaacagccttcttataaataatccctcactataagaaatcactgtaaattttattcttttttgtcttataaaaactaaggataaagagaggtcttatcttcgcttcataccccctcgtcctgcacctccccctatcttatctgcgatgagcagagggagagtattaaaatgtcactttgaatggcctttctgtgctttctttttgctttgtgagtactttctattcctttacagaaacatagggagagagtgtgtgatgctttgatatgcctcctctgctaaggatattttttaacccctccgtccagaggacacctcccctatattttgctatgcaaaacacagaggaggagggtaatactttcctgtgtatcgtgtttgttcttctccccctattgctgggcgacaccccgtaatactacgggacacggcagggaggaggttcaaaataccattccaatagtgtcacaccaatccatctctgttttaagagaagtgtatgaatatccggcaatgctacataggtatgagagaagaaaaggattttctaccattcggagatatataggtaaaaaataagcgaacgtatcgcgaacgtttcttattcttcgtctccccacaaacggagggcaatgcgcgcacagccttcggcatcggcaagtgcatagtgatggcggtcgaagggaatacccaaataggcacaaaccgtaggtagccggtaattggcaatggacgtgcggggaataacccgacgcgcctgtcggagggtacagagaaatgtcccgtaggtataatcgatgccatacatgcgacaggcagcccgaagcacccgttcgtcgaaagccttgttatgggcaacgaaaggtaacccctcgacccacggaacgatctcgctccatactgcgtcgaacgtgggagccccgcaggtatcggccggatagataccgtgtacttgttcggaaaaacggcggatatagtaatcgggttcgggacaaaccaaccgatgcatgctctgcgttatttccccgccacgcacgaccacaagccccacggaacaaatactcgtaggctcgtaattggcggtttcgaaatctatggcgacaaaatctttcatgcgattattcttcgggtaaagatacggaaaaaacaagattatcgcattatcgaaatttcttcctgcaaattttgtcatacatgagatatgctctacctttgaagcaggaaacggatttgccctattcctactccctaatttaagaaaaacgaatatgaaaataggtattatcgtagccatgcaaagcgaattggaatgcgttcgctgtttactcgaaaatcctcgggaagagcagcacggttcgtctttgttcattatcggcacgaatgggaaacatgaactgattctgacacaaagcggaatagggaaagtatcgtcggccatacggacttacgaactgatagaccgatatgctcccgactgcatactgaacaccggtgtcgccggaggtatagaccgatcgatgcatgtcatggatatagtggtgggcagcgaaatcgtttatcacgacgtttggtgcggagaagactgtgcatgggggcagatagacggacttcccgcccggttccacagcgacccggcattggtggaaaaggcattgaaagtatcgaccgacttgtctctctataagggattggtttgcagcggcgaccgttttatcaccgatccggcggaactttcgcaaatcaaagggctgttccccgagggcatggccgtagatatggaatcggggtctatcgcacaagtatgttacttacgtcacgttcctttcctgagcttccgtatcatcagcgatacaccgggtgtcgacggccatatagaccagtataacaatttctgggaaaatgcgcctcatcgttctttcgagattttaacccaactcatcaatgtgttgtaaaacaaaaaacaatcgatatgaaaaagataccgagctttaccatcgaccatatccatttattacgtggcatttacgtttcccgtaaagattatttgggcgaccacgtcgtaacgactttcgatattcgaatgaaagaacccaaccgggaaccggccatcggttacggtgcgttgcacacgatcgaacacttagccgccacatttttgcgtaaccacccggtatggggcgacaaaatcgtattctggggcccgatgggttgctgtacaggaaattatttcctgatgcagggcgacctcgaatcgaaggacattgtagaactaatgcgggagacattccgatttattcgcgacttcgacggagaagtgccgggagccgctccacgcgactgcggaaattatctgctgcacgacctgcctatggctcgatgggaggcagacaaatatctgcgcgaggttctcgacgttatcgaggaaaagaacttggtttatcctactatcgaaaaatagtggggagattgtagatttaaccccctcgccctgcgggcactccccctatctcatctgcgatgagcagggggagaggattaaaagcgacacttcgatcggccttttgtgctttctttttgctttgtgagtactttctattcctttacagaaacatagggagagagtgatgttttgatatgcgtcctctgctatggatattttttacccctccgtcctacggacacctcctatattttgctatgcaaaacacagaggaggagggtaatactttcctgtgtattgtgtttgttcttctcccccgccatgtcccgtagtattacggggagttacgttagcaatataaaggagacacctcagaaacagtggtttcgaggagaggggttgggggtatgacaatcctatctgatttcctatcgggctggtatttttataaaaattagtctctttttccttattattccacacaaattgagtactggacgaccataaaatccctataactaggtatttcgaaagctcgccgaaagtcgttactttacatcgtgaaaaattaaagaataaaacgatgaaaaaaattggaatattttatggttcttccacaggtactaccgagagtgtagcccatacaatcgcacaaaagttgggtgtcgcctcgaacgacgtacacgatgcttccaaactgaccggagaaatggtaaaggaatatgacgtattggtattgggtacatcgacttggggctgcggagagttgcaagacgattggtacgacgctgtgaaggtgttgaaaaaggctggcctgagttcgaaagaggtcgcactcttcgggtgcggggactcggaatcgtactgcgacacgttctgtgacggaataggcgtactgtatgaggagctgaaagggacgggctgtaagtttatcggtaatcacgtaccgacgggcgattacaacttttcctcttctacggcagttgtagacggtgaattcgcggggcttcccctcgacgaaatgaatgaatcggacaagaccgaaggtcgcatcgataactgggtaaaaagtttgaaagattaaccttttacaaccggcatcccatgattacgtgcaatgcctatccggccgaattgaaagtgtttctgaaccacgtgtatgaatacaagaagggtgttcgcaacatggttctttatacgacgaacaaaaaatatgaagagtttgccgtcagtcgattgaacagccaaaacatagattattgcattcaaccgatcggctgtaataaaatcaatctgtttttcggccgcagggagtgtatcgaagtgattcaatccatgacttcccgacctttgaacgaactgacaccagaggaggatttcatattgggagccatgctgggttacgatatttgcggacaatgtctccgctattgcaagcgcaaagccaaatgaaataattataaaatcccccaaaagccagatctaattcgcggggaaagaaaaatccaaaacattggagtttgtttttagttagtaaagaaacaccgccccgtgaggagcggtgttctctgtttttatcgaataggtatctgtatcttcctaaaaagggattcagagctcaggaggacatctgagggaattgttcttttatacctccaccccctctccgaagaaactgctgtttcttaggtgtctcccttatattactaacgtaactccccgtaatactacggggcacaaccggagaaggttgatatccgcttctgtttccttttctgccagtatttttttcaactccctcgccctacgggcactccccctatctcatctacgatgagcagagggagaggaaacctgaatctgtcatctccacggccggtattttctaacccctccgtcctgcggacacctcccctatattttgctatgcaaaacacagaggaggaggttaatactttcctgtatattatgtttgttcttctcccctaccgtgtcccgcagcattgcggggtgtcacacagcggtatagggggagtgcccgtagggcgaaggaagcccccaacaacagtaacagaactgtaaacaaactctccggaaagactggaatgtggttatcgacaaaaatttcatcgctaacccttttgtttttctactgaaccagatttggcgggtcttacttcaaacgggcgaggacttctttcatacggcgcatggcttcggtgatattctcctcggaagtagcataagacagacgaagataatcgggagccccgaaagcatcgcccgccaccgttgcaacatgacctacttcgaggatatacatcgccaaatcggaagaggtgtttatcttgcgttcgccgtcggacttccctaaatagtggctgacctcggggaagagatagaatgctccctgcggatcgtttacttttagtccgggtatttcttttgccaaacgtacgaccaaatcgcgacggtgttgaaatgcttgtctcatggtttctacgcaaccttgctctccggcaaaagcggcagccgcggctttctgtgcgatagatgatgctcccgatgtgtattgtccttgcaatttattgcaggctttggcaatccacaacggagcagcgatgaacccgatacgccaaccggtcatcgcatagcctttggaaaccccgttgataatgactatccgctctcgaatagaggggaattgcgccagactttgatgggctcccacataattgatgtgttcgtatatttcatcggaaatgacgaatacctgcgggtggcgttccaaaacggaggccaacgcttccaactcttcacgggaatagacgctgccggtagggttggagggcgaacagagaatgagcagcttggtcttgggcgtgatagcggcttcgagttgggcaggcgtcatcttgaaatcttgttcgatgcccgtctcgacaatcacattttttccttcggcgagtttgaccatctctacataacttacccaatacggggcggggaggattacttcgtctcccggattgacaagggcaagaatcgtgttacaaatggattgtttggctccattcgaaacgacaatctgttcaggagtaaaatcgagtccgttttcgtttttgagcttcgcacaaatggcttgccgcaaatccatatatcccggaaccggcgaatagtgcgaaaaattatcgtctatcgcttttttcgcggcatctttaatatgctggggtgtattaaaatcgggttctcccacactcagattaatcacatctactccttgtgctttcagttcactacttttttgtgacatcgcaagcgtttgcgaaggagcaagagctgccaaacgatcggatacttgattcatgagaattattttttatattgttacactatgcaaagataacgcaaagatggacagtaaccaatttatccggccataccgaatgctgtctattttgcttcttgcgcaaagatacgtaaaggaaaccaattcgacaataattaacgacattctatcgcaaatttctttcccagaataatttttcggagcaaatagccagagtacccacagggctaaggggttagattttacaataaaaaatcctatacgctgtcttttttttaacccctctcttcggcgctttcgctcctctgtgtctcccctatattttgcgtcgcaaaacacaggggagaaggttaaatacaatccatctcattcgctaaaacaatgcgacagaaagtcattaaaatctttcccataccatgccccgcagcattacggagtctttctgtgtaatatagggaagacgaacaaacacgatacaccgaaaggtattaccctcttcctctgctcatcatagataagatagggggagtacccgataacagtaacagaactgtaaatcaaactctccgaaaaggctggaatatagttatcgacaaaggtttcatcgctaaaattcaggtctaccccacggattttctactgatccaaaatcggatttattcaaccgaatcataaaaaaactccccctattcgaaaattatgaaagtcgaacagagggagcctaaaaaatacattaattcagtagcatatctcttggttattattctaaataacttaaaacaaagagtttactttacaataatttctaataacaaagtagtagtataagtagtaaaaatccgttatgtcccagaagtcactaacgttgcgattgtctttacggcctcgccttcataactcatcggagacataaccggctcatagtcaaacggtataaattcagaaacttgtgctgtcgcaaaattatgatccgcatcgatgaataaagtcaattttgccccagccttgtggcctaccgcccgctgtaacgtatcgatagattgaaaattacccgactctaccatttgttttaaccgtgaaacttcggcgctttcgaaaagtagttcatattttttcaacacttttccagtagcccgacaaacagctatcttattccccactgcaactcttatcaatccatatataaggagtcccgcacccaacacaatcaaaaaaagtttgagggaggactgaggatcggaaacagcagatgaacctacaaaagcgagtatagcaattaccagtgcaacaataccatttacagaaattttctttttcatttcaatataaggattttccataaatttagaagaaacagtttccttttctatattttccatttgatgataaaactaattgaatcgtaataaaataattaataattaaaattccacgaaactattttgattgcttaaatcgacaaatctcaaaataggtcctaagtgccgagccccagatagcatatgtaatcaaaccgaaaagacgatatctctgccgaatttccatgtctctgaatctgcgagctatctcttttctatcgcattacagcaagacaggaatacgaatatacgcacactccatacagccaaagaatcatgcatcgggaataccagactattcaatatatgcaagtcctttcctgccacacacatacatgcagcaagaaaaccgggcgaggctcccggctacccgtgaataacggctacccaccgtcattccactaaatcaacattttacaaagggaatagagataatgtccgtcgtagcacaactgtgccttatatttatcataacaatcaccgacgatcttctcccgaagatctactaactgacaatataattgctgctcatataaaaatgcgatattttctcctactttccctgttatcggagaagacggaaagcgtgaaacattcacgcatagccctctttccaccggaataatcgccgtaaaactctgcataggcagggactgtgcccgaacatcgataaggctataaggataagaggggtcttgcggtttcacaagctcattgtcggctcctgccgacaaaaagatggcagaagtaagcccgaatataacggcaaacaagaaggctactatttttctcatgaaacctttcatgtgacaaacgtataaaaaatcttcgagattcacaagaatcggttctatgatatatatttacattaacgcacgtgtaatcaaatgacatgactaaacgggcgatcggtatggtcgaaaaggaagaaaacggagtttaatacggctctttctattgactttgagactgctccccaaatcccaaccgaaaggttatcttttcaaaattgaatttcaccccattgcaaggatatccttttctcgcctctccaatgaatattttctcccataatcatgcgatatatcctcgcaagcggacttctcgacagagagcaacaccgtgcagcatcatattttcaagatatgcgagcctgtcgaagtggttatacgcacaatgcgcatagctccttcggggatatgaacaggctccacgggccgatttttcctctttaaaaaagtaccgtcgacagcaaacacctctacacaaacgactccttcaccgataataacaatactgcgtgtgaagggattgtaaatatagggcacggtgtttttgcatttcggtagctccactcctgccaacagcgactccataccggttttggcatcgatgtgagatccgggggagccgatgagctttcgcacgtgatcgaagtcgagccgaggattggcttgcaaccacaatgccataatgccggtgactaccggcgtcgccatcgatgtcccgcacattgccccccaataattggtacgcccgggaatcaaggcatcgacctcggtataagccaagtcttcgcgatttacattataagatgccgcataattattgatcgccgaaataatgtgtgcacccggtgcaagcacatcgggcttatcgcgtccgtcaaatgtgggtcccataccggaaaggggatacctctcgcccacagtccaatcggaacttcgttccataccctgcaaattggtaaacttgtctcgcgacacataggcacccaccgatatggggattttcccacaagcggtcgccgccatcgtgcttgcgttggagccgttatcaagttccccgtaatcacaacatgcaatgtattttccggcagcgcccgtcactgagaggttccatttctgcccgtctttcaacggggcatagaggttgatgctcacaccgcgctgtaaaccatcggcatctttcataggagaaagcgtgacaagcgaatagtctttttctccggttatattctcgtgacttaccgactcggaagcatcggagctaatcgaagtttcaaaagcgactccatcgctacctaccaacgagaggctcacttgaaatgcagatgtggtcgaacacccgataaaaacattttcacgcatgtgcgatggtggagtaaacgatgtgttaatcacctcgccctgccctacgacctcggtcacgatcgtggagttgcgatgcccctcgttaccggctgcaatcgccataaggcattttttcccactttcgtcgagcagaccgtcaatcatcgatgcgatagggtcagtcccatctttgaagcctatgaccgtacccatactaagatttatagccatcggtttcttctctttctcggcgtaatcgagcagataggcaagggcatctatgattccggattcgctcttgtcggtcgccactaccacaatgtcggactccggcgccatacctttatacacatcggccgaggaggctgcaatcgcagccacatgagagccatgagtgtctctcgaaacatcatgagccgcagagcgaatcagttccggggtatcgaataccacaccgtatcccatagaagaagtgtttccattcctaccgctctgatcccatacatgaataatgcgactattgcccccggcatcgcgaaatgcaggatgcatgaaatcaaaacccgtatcaatcacccctatcagcacgccctttcccgtgaaactgcgagggaaatcgggaagacctacatgaagagcatccacatgagaatattccctcgcaagatcggtcatggcttttacactgtttccggcatcaacattctcgacatcgggatcttcggcgaaatccaccaatgcgctcatcgggattactgccgtagccaagttacccgtcaccacattgaaagccactccatagtccgcagcaagcctgtcgaggtcggcctcgtcgcaaagtctcactatggcatgtatattctcatcggcagaccgcaagaccgatgctctctgatgaacacgggtaatcgtggaagcggtgagcttcgaagggtaatatatcgattgaaacggctgcgccgaagccataaaggccaacgcagccgtaaccatacatacaaatttctttcgcattatcataagtcgatgatattataatgcagagagcgcgaggggaaccgatagcatgcgattccccttcactttctcgttactttttagaacaaaaatttatgggtcgtgcaattaccatcgtctgtaaccaaagcaactatgcatactcccttaccgggcaccgtaacgcagtcgccatcggagacaacagccgtcacgatcactttaccggtaatatcgtaaacactaaggcgagctttttcacctgttgccgatacaatcaccaagcggtcgccctctttaacaatctcaattccagctgtcgcaccgacagactcgatactgcccgttccgtcgatttcccacagaagagccgggaagccgtcggcccctacaccccacgcattagcagacagattggcattaagtttagcaatcatatcggcagctttcatttcttcctccgtaacagcggtcacacctgcctgctcgctcaaaggtttacagccggtgagcgcttcgacatagtaacaatcggaagccgaagatttttccaattctgcacaaatggggcttttaccgggcaagaaagaagaaccaacttccgcctcgatggaaccgatagcataacagttgtagactgtggattgctcggcccaaccaacaataccagccacccaataggccgatgggcacgaaattgtagccgaagaataacagttttgaactttcgatatactgacagtcccagcaataccaccagcaaacgaatgccctaccaacctaccggtatttacacaaccagagattgtcacagtcgcctcggcaacacccacgatacccccagcgttcatactgcccccgttcaccaaacccatgaagcggcaattttccaccttgccacccgaactataaccgataaaaccgcctacattgtcgaattcactaccttcaacggtaacaccctgcccgagagtgagattacagatgtgggtttcgggataagagactgcaaaaagtcccaccccaccgagattgacatcggcattattatttacgattgtgagattatcgatggtatggaaatcgccatcgaaagtgccacggaacactttcgactctctgaccaactcgggattctcttgtgtcgtatagtcattatagtgaccaatcgaaggcatttgcttgccacccatgtctaaatcggcggtcaggcggaagaattttccctgataggtctcaccggctgtcaccgtttgctgcaaatgcgacagttgtgcctcgttctctatcaagaacggattttgttccgaaccatcgccctgtgtccaagcagttgcatcaccgttccatgcggcataacttgaaaaagagatgcccatgaccattacaaacgatagctttttgtagaaatttttcatcataatttaaatttagtttatgtataatatttgtaaaaatatagctcaacaaactattcgattctcaaccagcgttttagacaacatcaatttgaatatcaatattttatattcgaatttctaacaactttatcggcctatatcaaattatggaataaagcccgaccaatcttatttttataagcggaggcaagttatataaaataatattaatatacaagaaagaaaacgaaagttttatcattataataatatataaatattgctattatttttcaaaagccaatcttaataaagattttgaataaaaatcaaaaaaagttttctgtggaatttattttatcaacgacaagccatacgagttccatatccacccacgcacaatttctacttgccctgtattacaaaacgacaagacactccacaacagaatattatggataaaacggctttaccggaagggacatacaaaaaaatctcgaaatgagtgatgccgaagaggttaccgagaggaggctcttcggcatatcttttccggaacgtctcagaatttctgcatatcgaccaagcgtttataatagcggtcgagttttatcaattcgtcatgacgaccccgttccacaatttcgccttcgtgcatgacgcaaattaaatcggcatcttttatcgtggaaagacggtgagctattaccagcgtagtgcgattacgcataaggttctccaaagcctcctgtaccagccgttctgactcggtatcgagagccgaggtcgcttcgtcgagaataaggataggaggatttttcagaatagcacgggctatgctcacacgttgtcgctgccctcccgaaagacggcttccccggtcgccaatgcaggtatcgtatccttgttcggtcgccatgatgaaatcgtgcgcattggcgattttcgctgcttcgatgacttgctccatcgtcgcgttttccaccccgaaggttatattgttgtagaaagaatcgttaaagagaatggcttcttgattgacatttcccatcaatccccgcaaatcgtgcactctgaaatctttgatattgattccgtcgatgtaaattcccccttcattcacgtcgtaaaagcgaggtaaaaggtcggccatcgtagattttccggaaccggactgccctacgagagcgaccgtctgtccctttttaatggaaaggtcgacgtgcttcacgacattttcggtactataccggaaagagactccccgatattctatcccctctttcatttccttcaattctaccggattcttcgggtcttgtatgggattcaccgccgacagaatgagatcgaccctcaccatagaggccaaccctttctgtatggagtaagcggctttggacaaatctttcgccggattgataatgctgtaaaaaataaccagatagtaaatgaacgaagcggcatcgatactgctcgttcccgacaagatgagcgaaccgccataccaaaggacgatacaaatggtacacgtacctaaaaattcgctcatgggatgcgccaacgactgccggcggttgattcgattggatatgcgataaaaacgattgttatcgtcgtgaaaccattttatcattttatcctcggcattgaaggccttgacaatgcgcaacccgcccaaagtctcctctatgatagacatcaacaatccccattgattctgcccttcgagagaacgacgtttcagtttcttacccacttgtcccataatgtatcctgccgtaggaagcagaatcaagacaaaaagagtaagttgccaactaatggcgaacatggtcgccagacagacaataatcataatgggattcttgaacatcatatcgagcgatgccattatcgaattttctatctctcctacatctcccgacatacgggccatgacatcgcctttcttctcactggtgaaaaagccgataggcagactcactactttttcatacacataattgcgaatgtcgcgcacgattcccgaccgaagcggtatcatgaaataggagctcaaataggtagcggccgtcttgaaaaaggtcatcaccattaaaaaaacgcccaatatcagcagggcgaaaccggctcctttttcatcgattatggttgtaatgtaataatagaaattatttatcaccacatctttaatggaacccgacccccattccataaaagtataagaagcctgtttgagcttgaacaatatttccaatataggaatgataagggcaaacgagaaaagcgtcaagaccgacgccaaaatattgaaaaagatattgagggcaaggtaatatttataggggggcacaaatcgccggagtatggaaaaaaaatctttcatgcttcacatattgagcccggacagaaccgagcagtttacggctgcaaagataacacaaatacaaagatagcagaaacaggagcttaaaaagtttccaaccaatccgacaaagagcattttcccggggaatagctattgtacttttctttcggagacacctcgaaaggggaagaggttaatgcctgtctctgtttctactgcgggtatttctttaaccctctcgacctgcgggcactccccctatctcatctacgatgagcagagggagaggagtcctgacttctgccacctccactgccagtattttccaacccctccgtcactgcgtgacacctcccctatattttgcatggcaaaacacaggggaggaggaaggggacacatttcttatttctacaatcagacgagtttttatacaacgagataaagcaatacaaccttctcccctgccgtgccccgtagtattacggggagttacgttagtaatataggggagacaccgaagaaatgacagttccgaggagagaggttgaaaaaattacatagtttttctaattgtagaatctaaccttactaaaattatcggccagttcaacgttcaatatctggtactttgcctgaaagaatctaaccccctcgccctacgggcattcctccctatctcatctgtgacgagcagagggagaggagacctgactctgtcacctccactgtcggtattttccaacccctccgtccgacggacacctcccctatattttgcatagcaaaacacaggggaggaggataatgtaattcttgttttttcatttcagaaagatgaaatatatcgttcttctttataaggcaataaatcaatgccacggctttcgcctctatgaaaacacttgtttccgattctttcgaaataaaatcttgcacaggcaaaattattataatatttttgcacggattgcgaaaataggcttatcgtcacatcaaaagacggccaagccgtcattttcgtttatcttatttttaccgatagcgaatttatgggcgaagccgtgcacactttatcgattatcattcccgcatataacgaggaaaagactattgcagaactgctgcaacgggtactcgatgccgatctggggagcggcatcgaacgggagttgatcgtggtgaacgactgttcgaccgattcgacagaacaaatcgtcgaagattttatcgcccaccatgccgacgctcctatcgtttacttgaagcacgaaaagaattacggaaaaggcatggccgtccgcacgggcatacgagccgtaacaggcgattatatcgtcatgcaggatgccgacctcgaactcgatccgaacgatttcaagaaaatgcttccttttcttttatcgggcgaataccatgtggtatatggctcccgatttttagcagaggaaaattcacatacttatttcagttatcaactaggcgggaaatttttatcggtaatgaccaacattctttatcgtcagcacatcaccgacgagcccacttgttacaaaatgttcaccgccgatttgctgaaatcgattcctctcgactgcgagggattcgaattttgtcccgaagtgacggcaaaagtttcgagactgggttacaaaatcaaagaagtacccattcgttattatccccgctctatcgaagaggggaaaaaactgcgtctgagcgacggtttgaaagcgataggcacgctgttgaaatatcgtttctggaaaatacccgaatcatgaaaaatagcaccacaagcaaaaaaaacacaccttccaccaagaagggtactgcaacgcctcaaaaagagggaatctctttttcatgggtcgcaaagaacatttttgccgttgtcatcgtattgtttctgctaaacaaattcgtcctcgacgtacaaccgggttacaactgggcatacaacatgcttcaaaaaaacttggagactatacgtcattactcccgtacgacgacagacaaccgctttgaaatgaagctgggactttctcatgtgtatctgcggtacgtgaaagagaacactcccgaaaacgccgttatcttgttaccgggaaaagaggctttttaccccgaaggagaagaacgtatattctcgggcgaaccttataacaaactatgggctatccggttcttatatccgcgccgagtcattatcccatcggaattgggtaaaactccttggagcgagaaagtcacccatgtagctatcgtcaacggtcgcggatacgaatatctcgactacgaggtagaacaaaaagcgcctcacgccgtattgcccatgcgcctaaaaccgtaaccatcatgttagtagtatcaggaatcatattgacttgcctgtcgggtcttttattaacaggaatcatcgggacgcgtttttcgtggaccgaacgcataggattgtctttccctctgggtatgacgctgcaaaccgtcgtgatggctttgctcgacttaatgcatattcccctgaccagtttttcggttttatcggcgggagccgtaacattcgccctattgatgtttttcgtagcccgttaccgaggattcgaaagtttccgcatcacctcggctatgctcgatgactggaaacaagctaacttggtatgggtattgctcatcatactcatcggttattgcgaatacatgaatttctcgaaatgcatgtttttccctcccagcgaccgggacagccttgcggcgttcgacaccttaggtttcgtggcggcacaagaccacacgtatatgcgcatgagtttgttcgacgccgattataatccctcgatacaccgcgccggaggtagcatagcatacgctcctttcgtacaaatgagctatgcatacgtctatatattaggagccgaaacatcgaagtcgataccggcgttgatgtatttgttctttgtcattgctttctacggaattctgagacgaaataccggaaaaaccgtcgccgcactgtctactctgtttatgatgatggctcccgaaatgctcgcgttctcgtcgttatcgaccaccaacgtcatgcaagccattttcgcaggactgggtatcgcttataccgccagttggctacgcagccgtaacgacgacgaattgtatgcaggagcgttattgttgggcgccaatatgtggtgtcgaaacgagggtatcgtattcatcggcgcagcttgtgcgatattgctgatcgattgcatacgccgcaagagttatcgaaaaggattgtactttaccggattgtccctgctcccggccattatctggtttatttacatgaaaatcgggggcttatataccgaaggcatggctattacccgcctgttctgggacggggagaaagccggattgatcgtaaacggcttttgggctttgtttaccaatcccatatattatggctggacattctcggtattcgccatttttattctcgggaacagctggttcatgattaaaaggaaagacaacctcgctttattgggaatgattgtactgagcatcgtattctacgggctcgtcgtttaccacgtggactacgtatgggattccatacaaaacgtattggcctattcggcaaaacgattctttttctgcttcgtaccgatgtgctggtatttcgctgccaccacacaaatagcccgaaaaggttcggaatacatagagagatttctatcgctaaaataagacacggatttaagaagctgttttaaatttattgagaataatattatcattgcaagtaggtatgttccggccatattgagcccctgtctcgcatcttgaatcccttgatttttgtcaatagcccgctattgactgcatatctcggactccaatctgcttcaaacataggtctcaatctgtctcggaataaatttaaaacatcttctaaatattagcctaaaaaatgcaaaaaagcgagtgggcatttaaactttggcggggtgtcaaggtcttataaacgttgtgatcaatagattgatttttttaagatgaataagagaggttttattgccctatttctgtgtatttttttatcggccatcgcgcagagcgtagcggcacaatttacaatttcgggtatcgttaaagacaaaaacgacaatctgccattaccacaagtgagtatccggttgttatcggcaaaagacagcacattcgttacggggatttccagcaaagacaacggaacattttctctgaaagtcccgaaagcggggagttatattgccgcattttcattcttgggatatagaaccgcatacgaacccgtgcagctatcgaaagggcagccccgaagaaatttgggagatattctattgggtagcaacgatgtattgttgcaggaagccgtagttgtgggcaaagctcccgaagtggtagttaaagaagacacggtggagtttaatgccgactcttataaaacacagcccaattctgtcgtcgaggatttgttgaaaaaactgccgggcgtcgaggtggatagcgagggaaaaataacccatgcgggaaaggagattaccaaaatattagtggacggtaaagagttcttctcggacgaccccaaagtggctactaaaaacctgcccgtggacatcatcgaaaagctgcaagtcgtagaccgaaaatcggaccttgcccgcttgaccggagtcgacgacggggaggaggaaaccgttatcaacctgactataaaagagggtatgaaacacggttggttcggtaatgtaacaggcggatacggtctggacggacgatatgaggccggggctatgctcaaccatttcttcggtgacaaccaagtgactatccttgcaggttcgaacaacacgaataatatgggattcaccgatatgggcggaagccggtttcgccgattcgggggcatgaacggtatcaacaccagtcacaacgtaggagtaaacttcaatgtcggtaagggagatgcgttccgagtcggcggagatgtcagttacaacaacagtaatcgagacgttttgcaacgcaccgaacgacaaaacatgttcgaagacagtacctcgtattacagcgggtataacaaaatgaaagacaacgggcaaaacatcagaggaaatttcagactacactgggaaatagactctctgaatacactcgaattccgtccgagattttccgtggctctttccaaatcagacagctatgattcggctcttactactgccggcgacatagcccgcagtaaagtaaatttcagcgaaagcgacaatcacaataagggtacagggtatgatttatcgggcgaattgatttataatcataaattccgtaaccgtccggggcgctcgttcagtatacaagcgcaatatagttatagcgacacaaaagaggacgggtggaccaaagctctttacagatattatcaacttaacagcgacagcacacttgaccaaatggacgacaatcacacgtggagcaatggctacggtgcacggtttacttggacagaaccgttgggcgacgtgaagaaaggacgtttcctaacattttcctatcggtttcaagccagtttcaacaatgccgacaaatatacttatgacatcttgaacgatcctttcgccataccttacgacacggtgcgaaacgatgagctgagcaacagtttccgtaacgattactattcacaccgagcacaaatcggattcaagcaagtgacggccaattatacctacgatatcggggtggctgccgtcccttcgagttctcaatctatcgacttgataaacagcgaacgcaatatacccaagcgcacggtattcaacgtagcgccctatctgcgctaccgctacaaaatgggaaaacaacgctccttgcgtatcgactaccggggctactcgtcccaaccgtcgatgaaccagttgcaaccggtcgaagaccgttcggatcccttgcgtatcgtcgtgggtaatcccgaactgaaaccggcttttcaaaactggttccgcgcccgtttcaacgactatgacgagaagacccagagagctatcatggctatggtcaacggaggattcacgaccaacagcatcatctcggagactacgtatgattcccaaaccggaggacaacggacaacctatcgcaacgtaaacggagtatggaatgccgccggaatgctgatgtatagtaccccttttcgaaacaagcactggcaattaaacagtttcagcagaatcagttacagtaacagcgtaggttataataacggtgtccgtaacaatgccggctcgttcaatgccgtagaaaatttaggattggcattccgatcggattatttcgatgccgaacttcggggaaactatcgttatgctttggcaaccaacagtatgcaaagtcggaacgatcaaagcacccataattacggaggcacattcaatgtaaacggctatctgccgtggtcgataacattaggaaccgatataacttacagcggatctgccggatattctgccggatacaatacagagagctggttgtggaacgcacaggcttcttatcaattcctgaaagggaaaaatgctaccatcgctttgaaggtgtacgacatcttgggacaaaggaacagcatacgacgaaccgtcacgggtaactatatccaagatgtggaatataacacactcgatacttatggattgataaccttcacctatcgattcaatacattcggcgataagaaacccgatatggatcgtttcgaccgagggcctcgcggatatgggccaccgccgggacacccgggtcgtccgggagggagacgttggtaaaacggctcagtagaaaatcggtaaggataaacataaattttagcgatgaaatctttgtcgataaccatgttcaagtctcttaggagaagggctaaaaaagatagaaatctttgatcgtagaatttacccccccctcgtcctgcgggcactccccctatttcatctacaatgagcagagggagagtgtcgatatcttgatgcgttttctctgttgtggatatttatttaacccctccgtcacttcgtgccacctcccctatattttgctgtgcaaaacacagaggaggagggtaatactttcctatatatcatgtttgtccttctccccagctgtgtcccatagtattacggggagttacgtcagtaatataagggagacaccgaagatacggtaatttcttaggagaggggttgaaagaatttcataagattttggctgtaaggattaaccttctgccctatcgcacatacgtgcgcagggcagaaggttaatgcctttctgttttccgactcttctgtcacctctccctatattttgacatgcaaaacaccccgtaatactacgggacacggcagggaagagggtatatgtgaaagtaattttttcatatatacttcttacaaaatcgattacacaaccgattgcctaatgcacagtaaccatcgtcgctccgaaaccatattcccggaacgaggcatcttgacaagagcagttcttgtacttgtcgcgaatctctttcaagagagcattgcgtaatacgccttcacccttgccgtgaatgaaaacaattttacgcccctttgcatggcgatattgatcgagggtctccctgactttccccaactggtagtcgagtatttcggaactggtaagccccgctgtcgtatcaagaagcacggaggcgtggaggtccacttccacaatagccgttttttcggcatgtttgacaaccggtttacgaaggggtatatcggcactctttttcatcttcatggccctttcgaggtcagaagcatcgaacaccacaggacgcacgggcatatcgttcttcacgatatcgagcgtccacgaaggctcatcgaaatagagactctcgcggaacgtgtgcagcttgtaaaatttggtggtatccaaacgatactccacagcgacaggacttttcaacgagaaatgtttatcctttttgaaagcgatgtactgaatacagatacgttcgagcgaattgacatcttcctgtccgaactcttcgagcataacttgtatattcggctctaccataccggcataacgggtacgccacccctcatcgtcccggctgaggtacgagaaatagagatagtaattactgtcatttaccaaataacaggaaaagcgggtcgtattgagatgtttgctttcgtcggggatataggcaagagctatattcaacttttctccttcgggtcgttcctccacagcgaacgaatcttcatcgtcctcctcgggagcgtatgccttctctaccgaaggaaccgtcacgactttcgaggctggaacagaagctgcttttttcgcaggttccgccggttccacaacgacgcactcccgtgccaatacgggagtctcaaacccgtcctcatcgacataagctatatctttcgctattcttaccacgattccgcccccaacagcattgaggtaacggaccctatcgccaacttttaccataatttcatcattttaatatcgaccgcaccgttgtactgacatgcgatttcgctgtgacaaaccgtgctatattcggcaaagttgcttatttttgcacgatattcaaaacagattatgcaaaaaactcagaatattcgtatcgaagatttcaattatccgctacccgacgaacgtatcgctaaatttcctctgtccaagcgagacgactcaaaattactggtttaccgaaaaggagaaatcgaggaacaccgatttcacgaactaccgaaggtattgccggcggatagtctgctggtattcaacaatacccgggtgatacaagcccgcttgcatttcagaaaagagacgggtgcgctcatcgaggtgttctgcctcgaaccgctcgaaccgcacgaatattccctctcgttccaatcgaccggctcgtgctcgtggctgtgcctcgtgggaaacctgaaaaaatggaaaaacggcgtgctgacccaatcggtgaacatcgatggtaaaaccgtaaacttccgtgccgaacgaggattgccgcacggtaatgcgcacgaggtgcatttttcgtgggacgactccgatgtaaccttcgccacactgctcgaccatgcgggagaattgcccattcccccctatctgaaccgggaaacggaagagagcgacaaaacgacctaccaaaccgtttattcgaaaatagagggttcggtggccgcaccgaccgccggactacattttactccggaagtactgaacaaactgaaagaaaagaacatacccactctcgaactgactttacacgtgggagccgggacattcaaaccggtaaaaagcgaaactctcgaagggcacgagatgcacaccgaatatatctcggtgagccgcaacctcatcgatgagctgagccgtaccgaccgccgggtgatcgctgtgggaaccacttcggtacgaacgctcgaaagcctctactacatcgggaaaatgttggaacacaacccgaacattttaccggactctctctccgtggggcaatggcaaccatacgacggaagcgaagaaatagactcgcgacaatcgctccgcaacatcgtcgaatacctcgaccgccggaatatggaccgattggtaactgccacccagattatcattgcgccgggataccgctatcacatcgtacagggaatgataaccaatttccatcaaccgcagagtactttactactgttagtctcggcattcgtaaacggacgatggagagaaatatacgactatgcactgagccacgatttcaggtttctcagctacggagacagttcgctattacttccataagccagttccatagagtgcaaacacaataaaacgggggaaaaaacgtatctataatagatcggtacaggataaaaacggacgaaaggccgtccgcttatcgtcggttgtattcaataagatacatgaaaataaaaacggtactttggggattggcgacagccgcattgctggtgtcatgttcgggggcgaaactaagtgtcgccaacgaacagtatgcccggggcgaattttatgatgccgcccagacttaccgtaaagtatacagcaagacgaatccccggaaagagcggaaactacgaggagaaatcgccttcaaaatggccgagtgttaccgccgcatcaacatggctccgcggagctctgccgcctaccagaatgcaatccgatacgactaccccgacagcatggctctgttttatttagcccgcagccaacagtacgaagggaaatacaaagaagctatcaagaattaccaagcctatttggaaacgaatccgcaaagcagtctcgccaaaaacggaatacggggttgcaacttagcccagcaatggaagaaaacgcctacacggtatatcgtgaaaaaagcgaccatgttcaactctcgacggagcgatttcgcaccgatgtttttaggagaagatttcgatcaagtttatttctcctcgtctaccgaaaaggcattgggcaagaataaaagcggtatcaccggaaccaaaaactgcgatctatttttctctaaaaaaaacgagcggggagcttggcaaaagcccgaacccatagagggtgacgtaaacacagaagacgacgagggtgtaatcagtttcagtcccgacggtacgaccatgtatctgaccaaagctcgtcgcgagcctaacgcagacacatcggtagaaatctatacttccacccgtaccggcgcacaatggagcgccccgcaaaaatacgaaataacggccgacaccctatcggcattcggacacccggcggtatcacccgacggagaattcctttatttcgtgtcggacatgccgggcggttatggagggaaggacatctggcgtatatcgttaaccgagaaagagggtactctcgaaaatttaggtgtacaaatcaatacaccgggcaacgaaatgttcccctatatccggtcgaacggcgacctttatttttcatcggacggtcaccccggtatgggagggctggatattttcaaagcgagaatgaacgactcgggcctctggcagatcgagaatatgaaggctcccatcaattcgcaggccgacgatttcggcattactttcggggaagaagaaagcggatttttttcatcgaaccgcggagacggacgcggatatgacaacatatacagtttcgagcttccgtcgataagcgtatggataagcggcacagtcatcgacaaggacgatgaacccgtgcccgatgcaattatccgtatcgtgggtaacgacggatcgaaccaaaaagaatttgcccgaaaagacggcagtttccgcttcaaactcgaccggggagtacactatgtcatgctggccagctgccgaggctatctgaattcaaaacaagaatttatctcggacaacgaagaggccgatgccgaatacggtgttaacttcgtactggcatctatcagtaaacctattctcatcgaaaacatattttatgacttcgaccgagcgactttacgtcccgaatcggaaacttcgctaaacgaactggttaagatgttgaacgacaatcccaacgtatctatcgaattgggtgcacacaccgatttaaaagggtcggagcagtacaacttgcgattgtctgaccgccgtgcccgctcggtagtagactaccttatcaaatcgggcattaatcccgaccgtctgcaaccgaaaggctacggggaaagccgtcccaaagtcatcactaaaaaactcgccacacaatatccacaattcaaagagggcgatgtactcgatgaaaaatatatcaacgggctctctcccgaagatcaagaaatagccaaccagataaaccggcgtactgagtttcaagtcctctctattacgtggaacttatattagaagctgttttaaatttattgagaaatcatattatcattgcaagcaggtatgttccggccatattgagcccctgtctggcatctagaatcccttgatttttgtcaatagcccgctattgactgcatatctcggactccaatctgcttcaacataggtctcaatctgtctcggaataaatttaaaacagcttcttaatttcacagtcctctttaagttcagcagaaaaatccgtggggtagacatgtattttagcgatgaatgtgcttgtcgacaaatacattccggtctcttcggcaagaggttgaaaaaacaatcaaatagattttcgataaaatgtaacccctccgtctcttcgtgacacctcccctatattttgcgctgcaaaacaccccgtaatactacgggacacggcaggggaggagtttcatacttttgttctactattgtgtttaaccccctcgccctgcgggcactccccctatattcccttacggaaacacagggggagaggattgaaagaggcattttatgttttggcataaggatagttttgtgcatttctcttctattgttgcacgacaccccgtaatgccacgggacacggcagggaggagggtaaaagagtcgttttgaacggccttttgggggttcctctttgcttcgtggggttccccctatattcccccttgcagaaacggaacctatcgaaagtcattctccctctatacgaatttgcaatccttgttatccaacaggaaaaatgacaaaggaaagatttcaacagacatttattagccatgctcccaaaaatatatggtaacaaaccgaacgagggacactattcttttatcggactacaataatttttacggtcgatttcgtatgaatagcaattaaattgtatttttgttctcaatcacaatagaaaaaccactatgctgaaactcatatcttggaatgtcaacgggctacgtgcttgttacgacaaaggattcaccgatatattcagacaattggatgccgacttcttctgtctgcaagagacgaaaatgcaggcgggacaactggatttgcaattcgacggttaccagtcttattggaactatgccgaaaagaaaggatattcgggaacagctgtctttacccgacttcaacccatcagtgtcagttacggcatggatagaacagaacacgaccgtgagggccgtatcattactctcgaaatggaagatttcttcttggtcaatgtctatactcccaactcgcaagaaggattaaaacgacttgaataccgtatgacatgggaagatgattttctgcacttcttgaaacaactggaaacccaaaagccggtcatcgtatgcggcgacctgaacgtggctcaccaagaaatcgatttgaaaaatcccaaaacgaaccgaaaaaacgccggatttaccgatgaagagcgctataaattcacccaactactgtctgccggattcaccgatacattccgctatttttatcctgaccaaaaggacatctattcgtggtggtcttaccgtttcaaagcgagagaaaaaaacgccggctggcgtatcgattattttcttgcctctgcatcgctcaacgagaaattgtgcagcgcgaaaatacacacggaaattttcggctcggaccattgtcccgtagagctggaagttgacttataatcatacatatacctctaaacgacttctcaaacgatagtgaataccgaatttactatctaccgcagtcgcagagtatcgcccaccgaaggggtataatcgtccgggagtttgttcatcttatagagatttttcaaccggataccgtatcgttgcgcaatggtgtgcatagagtcacctgaacggacgatacagaagtcatagcctttctcggctttcttctttttcttttcaagatagacaatgtcaccagcctctaacggatagtctttgggaacttcgttgtacttcgccagttttttcaccgagaaaccgaattccttcgctatggattcgagcgagtcgccgtcgcgagcctcgacataaagcaatccccacgaacgataaacgggatgcggattggctacgataacgggtaaaaggtctttcgcccgaataggcttgaaactacggcggtcgtatttataaagttcgtaaagctcgatggtctgaatcaacttattggcatacgacttatcggtggcatacccgcagcgcttcaaacctttcgcccacccccggtaatcggtcactttcaattcgaaaagagaagcatagcgagctctctttaagaaacgggcatgatcttcaaacgaatcttccggtttattatatttacggaaacaatcgtctttcttatcatcgtcgtaataaaccctcttccccttccaatcgctatgacatttgataccgaaatgattgttggacatacgggccaattcgctacgaccggctcccgattcgagcaacccttgtgccagtgtaatactggccggtatgccatactgcttttgatgttttaccgctaatgaactgtatttctcgatataatcgagataggccttatttttacgttgtgccgagagttgcgaaaacgagagagtcaacgcaagcaaggatatgatgaatcgtagtttcataattcgctcaatacttaaaaataaacgacaagaaatccggttctctcaaaatttgttttttatttgcctctgcactcacctttcgctatatttgtaaacacaaatatagaaccgacttaattacagttatggaaaaccggaacatcaccacaaagataatcgtttgttcgtatgatgagctaaacgaaaaggagaaaaagttgatcgacgccgccaaagaggcaacaaaccggtcttattcgccctactctcgctttcaagtaggtgcggccgccctattatcgggaggaaccgtcatcacgggaagcaatcaggaaaatgccgcttacccgtcaggaatttgcgcggaacggactactctattctatgccaactctcaatatcccaatttgcccgtagaggcgttggcgatcgccgctcaaaccagcggggatttcatcgaccaccccacagcaccctgtggtgcttgccggcaggtaattctcgaaacagaggaacgctacaaccagccgatgcgcatttatctctatggcaaaaaagaaatttatatcgtagagtccatacggagtctgctgcctctctgcttcgggaaaagcgatttgccggaatagggtacggaaaaattttgtatatttcaaaatatagagggcaattaggtatgaaaaatagatttgttcattttatcttgccttcttcttttcctatatttgtagaatatataagatatggttcggcataatcaatccagaaatgtgatttccgtttgcctctgcactcacctttcactatatttgtagaatatcggatgcggttcggcatagtcaagccgaaaatgaaattttcgtttgcctctgcgctctcctttcactatatttgcaaaagaacttagaaaatctatatggacaattatatcgtttcggcacgaaaatacagaccatcgacgttccgttcggtcgtaggacaaaaagcattgactcaaactctgaaaaatgcgatcgactcgaacaaactcgctcatgcttatttgttttgcggccctcgcggcgtagggaaaacttcgtgtgcccgtattttcgctaaaacaatcaactgtttccacccgaccgaatcgggagaagcctgcaacgaatgcgaatcgtgccgagctttcaacgaacaacgttcctacaacatcatcgaactcgatgccgcttcgaacaattcggtggacgatatacgcacgctcatcgaccaagtgaggataccgcctcaaataggcaagtacaaagtgtttatcatcgacgaggtgcacatgctgtcggctgccgctttcaacgctttcttgaaaacgctggaagaaccgccgcaccatgctattttcattctggcaactaccgagaagcataaaatattgcccacgattctgtcgagatgccaagtgtacgacttccaacggattaccactaccgacatagccgaacatctacaatacgtggcttcacaagagggtatcaccgccgaaccggaggccctgaacatcatcgcccaaaaagccgacggcggtatgcgagatgctctctcggtattcgaccaagttgtcagtttttcgggcggacacatcacctataaatcggttatcgagaatctcaacgtactggattacgagtactatttcagattagtggatgctttcttgcaaaacaacgtaccgcaggcgttgatgatattcaaagaaatacgggacaacggtttcgaagcccaatttttcatcggcggactgagccgtcatttccgcgatctgctggtcagtaaagacccggtaaccctccccttgctcgaagtgagcgaatcggtggccaaacgctatggcgaacaggcggaaaaatgtaccttaccgttcttataccgtgcgatggaactgagcaaccgttgcgatctcgactatcgcataagcaacaacaaacaatttttagtggagttgactctaatacagatttgccaaatcacaaaccccgttactagcgctcccgaaaatccaccgttgcagaagataacgccggctcccaacgccggacaaacggtaagcccaacgacccagacaccaaacaccacggcctctcaacaaacggcaggaaccacatcgggagttacccagactgccgagcctcaggctgcataccgagccgcaaccatacggcctacaacttttaaacgggatattccggcagctccgacgcaaacaagaaaagcggctcccccgactcgtatctccatacatcagaaaccggcagagtctgtcgcagaggaaaacacatcgaccgtacaaaccgtactcgatacaccattcacagccgaagcccttaccacagcttggctggaatacgccaaaaccataccgacggaagtcgtgctcgtcaatacgatgcagagttgccgcccacagctcgtcgatcccaagaatttcgtagtgtcggtcgattcccaaattcaagtggaccacatcaacgagcatttccacgaattgatgtctttcctacaaaatgccttgaagaacaaccagttctccatgcaattacgtatcaaccaaccgggagagaaggaaattattttcagtccgaaagatgtactgatgaagatgatcgaaaagaatcccgatataaaaaacctatacgacacgttcgacctcgaaatcgcttgaccgtttacgagcaaaagatacggaaaggaaagaaaaaggcagcgggataactcatggaaaaattaaagcggaatgccatactcatgcttcacctcgtccatgacaaaagtactcatgagcgaccccatgctctctatcgtacctaatacattgataataaactcctgataatatttcatatcgggagcatggattttgagcagataatcgtaatcgcccgaaatgttgtaacactcggtcacttccgggatttcccggacaatgcgggtaaactcggcggctatgtcccgattgagcctacggagcttgacgctacaaaagacgacgaaaccccgattgagtttcgcaggatcgagcactgccacatattttttgatgtatccgttggcctccaaacgtttcacccgttcaaagacaggtgtaggcgacaaattaacttttgccgccaattctttggttgtcaagcgagaattgttttgtaagactcgcaatatctgcaaatcggttttatccaatatttccatagaatagtattctttcggggaagtccccaagattacaaacgatatatttactctaataatatcgtcaaatatagttatattttccatatttataaaaattcttgttcgatatatctacaatatatagctttgtacaggataaacaaatagatatttcaataaaaaaacgaacgataatggcacagaaaaaattgcatttcgagaccttgcagcttcatgtaggacaggaacaacccgaccccacaaccgatgcaagagccgtccctatttatcaaacgacttcttatgtattccataattcggctcatgccgccgcccgattcgaattgaaagatgccggcaatatctatggcagattaaccaacccgacccaaaatgtactggaagaacgtctcgccgcactggaaggcggagtggccgcccttgccgtcgcttcgggcgcagccgccgtcacttatgcttttcaaaacattacttgtgccggcgaccatattgtcgctgccaagacgatctatggcgggacctataatttgctggatcataccctaccggcttatggcgtgacggcaacgttcgtcgatcctgccgacttgtcgaatttcgagaaagccatacgtccgaacacgaaagctgtttttatcgagactctgggtaaccccaactcgaacatcatcgacatcgatgccgtcgccaagatagcccaccgccacaacataccgctcattatcgacaacacgttcggtacaccctatctgatacgccctatcgaacatggagcagacatcgtcgtacactcggcgacgaaatttatcggaggccacggcacatcgttgggaggtataatcgtcgattcgggcaaattcgactggacggcttcgggtaaatttccccagttgagcgaacccgaccccagttatcacggtatccgattcacccaagccgccggagcagccgcatacgtcacccgcatacgcgccgttatcctacgcgacaccggagcagccatcagccccttcaacgcattcctgcttttacagggattggagaccctctccctgcgcgtggaacgtcatgtagaaaacgccttgaaagtagtggactttttgtcccgacacccgaaagtaaaacgggtaaaccacccggctttgcccgaccaccccgaccatgcattgtacgaacggtatttcccacagggagccggttcgattttcactttcgagataaaagggggtacagaagaagcccatcgtttcatcgacaatctgaaaatcttttcactgctcgccaatgtcgccgacgtgaaatcgttggtcattcacccggcttcgactacccattctcaacttaccgaccaagaaaaagaagaacaggaaattttccccggcacggtgcgcctctccataggaaccgaacatatcgacgacctcatcgacgatttgaaacaagcgttggaaaaagtataattataaatcaaaatcataacgcgccgaaacgtccctgcccgatatacggatagggacgtttcaagttttatatcgccccttttcacgggaatcaatcacacaccttcacttaaaaaccgttcttatttttttacgagaagcatcacacaagcaataaatatgttatctttgtggaaaagcaaaaatattctatcccatacaaaaggggataaaaatatcgctttaagtttctgaaaacacaaataccgtaatcgattcttcacaaacctatcctcctttcgagttatgcccgctttatatagttatcacaaaacacagtttaaagaataatttattttagaatctaccgatatgacaaagaaattaatcattgcaatagtcgcagggatagtctttcccctttacgccatagccggacaaccctcagcccaaattactcatggcccctatttacagaatctgtccgaagatgaagtaacagtcgtgtggaccaccgataagccttgcaaatcgtgggtggaatttagcaaaaaggaagccgggaaaagtttctactcccaatcgccacgaaaagcctatgcctcacaagacgggttatattgtgtcgacacgctgcaccgggtgacggtcaaaggactcgaaaaaaatacgacctatttttacagagtattgtcgcaagaagtgaaagaattgcgggcctaccgtcctgttatgggttccgtagtatccaccgacatctggaaaaaaccgttgaccttcacaactctcgacaaccatcgagaaaccctgtcaatggttatggtcaacgacatacatgggaataacgaattgcaaaagaaactactgggtatggctccgccacaggacttcgacatggtacttttctgcggagacatgtgtagccacatcaaccggcaaagcgacatattcaccagcttcctcaacacctccatcgagttgttcgccgcccaaaagccattcgtgtacgcaagaggcaatcacgaaacccgcggagcatatgcccgcaacttctcccgatacttcgccggctccaacggtaaattctattatgctttcacctatggacccgttcgcttcatcgtgttggactgcggtgaagacaaacctgacaccgatgtggaatactctggactgatagacttcgacagttatatgctcgaacaaaaggattggctgtctcgggagatagacaacccagagttcaagaacgcctcctaccgtgtggttatctcacatattcctttcacgaaaggcggttggtacggttccgaacggctgcgggaacaactactgcccttattggagcaagcacaaatagatttaatgttgagcggtcacgagcacgcattcggattctccgacaaaggaaatgcggcctccttccccatcatcgtgaactcgaacaactcggtattgaccttgtttgcctcgaaccattcattgaaagttcaagtaaaacaggaagacggaaaaatcctgttagaaaaagaatttcagaaacaataatatagtcatataaatcaaacagccggggaaaatttcccggctgtttgatttacgcaacaggacctttattgctgattgagcaaaaagtgcttgaaagcgttgaagccgaccggcataaggatactttgtttttctccccgcataaagacttgcagtttttcgggaaccgaaatcgtctcgccaatagcggattcgaccgtttcgagaaatttagccggatgtgccgtttcgagacatatgcctgtctcgccgggctgtaatccgtcgactaacgcctgatagccacaggctccatgaggatcgagcaagtatcgttcgttacggaaagtttcgctcatcgttcgacgaatctgttcatcggtgtaacttaccccgcttacctcggcacaaatcgcatcgtgcgagcctccgtacaaatcgagtattcgcgcgaaattactgggatcacctacgtccatcgcattagcgatagtggcgaccgaaggccgcggcgtataaactcccgtatgcaggtattgcaaaaatacatcgttgcggttgttggccgcaatgaaccgtttcacaggcagtcccatgcgtttagccatcaaaccggcagtaatattgccgaaatttccgctgggcacactgaacacgacttcttcgggcttcccgactaacccgcacaactgcgcataggcgtaaaaataatagaacgactggggcaggaaacgggccacgttgatggaattggcagaggtaagatagagtttctcgttcagctccttatccataaaggcattcttcaccaatgcctgacaatcatcgaatgtaccgctcacttccaatgccgtaatgttgcgaccgagtgtggtaaactgcttttcctgtatctcgctgactttcccttgcgggtaaagcacgaatacttttacacccggaacatctaaaaatccatttgccacggcactgcccgtatcgccagatgtagctaccaacacattgacctgccgctcgccctcctgtttattgaaataggcgagtaaccgagccatgaagcgcgcccccacatctttaaatgccaacgtgggtccgtgaaaaagttccaaactataccggttatcggccacctgcaccaacggaatatcgaagttgagcgtctcgtcgacaatctctttcaatttaccggcttccacatcttccccgaaaaaggcctcggccacgacaaaagaaatttcgcgcagggtcatctctttcatattttggtaaaatgccgggggaaaccggcgaatcacctcaggcatgaaaagccccctatctgctgccaatcctctcaccactgcttcgcggagggaaaccggcgaagtttttctattcgtactgtaaaattgcatcgctcttttctattttaatttttccgaaagaactcttttataaactgctctcccaccagcaccccataagcgccgccggctacatcggactcgctgtaccgggtgactccgtcgggctccaccccagatttgtaaatcacaaacgggacaggctcggccgtgtgagtgcgcaaccggcaaggggtgggatgatcaggcaacaaggctatcgtcaccgaatcgctcattcgagatacggcatcgatgagcggttttaaaacccgatgatcgagatattcaaccgtgcgaactttcaaatcgacatcgccttcatgcccggcctcatcactggcttcaatatgcaaatatacaaaatcgtgcgtatgtaatgcctcgatcgccgcttgaactttaccctcgtaattggtatcatacaaaccggtcgctccctcgacttcgacaggccgcagaccggcatatacaccgataccccgaatgaggtctaccgccgaaatgacaacgccgctctttatcccataacgctcggccagtgtctccatacggggcttataaccgggagaccacggccagatgctgttcgccggatctttaccttcggcgacacgcttccgattgaccggatgcgacggcagaatctgttgcgaacgcaatatcaactcgttcagacgatcggctgtcggaacggcttcgggaacgagggaacgaaccattacctcacgaaaaagcgtaccgggaacatcgtgcggaggggtacagtcgactcgcttgtctccgcctttcaacttcaacaaatgccgatacgaaacgcctcgaaagaagttggcatcctcaccgcccaattcttcttgtaaaaaatcaattaattcggcagcttcggccgtagagatatgtccggccgaatggttcttgatacgaccgttttcgatacagacaagattacagcgcatcgccatctcgcccgactctatatcgactcccatactcgccgcttccaacgagcctcgaccctcgaacacccggtcgaggtcgtaacccaataccgacaaattggcgatttcgctaccggggtgataaccatcggggactgtcttcaacaaaccgcaacgaccatgagccgccaaccagtccatagccggagtatcggccgactgcaaaggcgttcgtccgcccaatttcccgatgggttcgtcggccataccgtctcccaaaacaatgatatatttcataggccctctgtttttttatttattctcatatatctgcgacagtcttccattgtcgttccactcgccgtacatcttgtttcgacaagtaaaccggataaatttgtccaaacgtcgccaatacaaatccgaattatttcttttcatttgtatatttcctattttcacccgcttataaagctccggaaaccgagagaaattatccatcgccacagggtgtttccgcagctcttcgacgataatatcgtctatcgtaaattccgtttcaagcaaatagggaaaaaccgcccttcccgcatcagtcatcgtcccttcccgttcgagatacctgaaacgagccttgttgagctcggtccaattgcttccttttttacggggagtgagccgttgcaacatcttgtcgccgacccgcttgcaggtagaatcgatccagccgaaacatagcgcttcataaacaacgtccaaatagggtaacccgcaggtgtgcacccgaccggaacggcaacacactatccagacttcatcgcaagagtcgtgattctcgctcagccaagcccgcagctgctctctggaaccgacattcaactcattacttatttccatgcttcgcactcgttataacccttatcgaatgttggcaataccgataatatcggcaaagacaccggcagctgtaacttcggctcccgcaccatatcctttaatgaccataggatattcccgataacgctcggtagtcagcaatatgacattgttactcccttcaagatggaagaacggatgagccgaatcgatttcacgcaaccccacctcgacatcgccgtggtcgagtgtggcgacgaaacggagaactttaccccgatcggcgacttgtctacgatactgttcgaactcggcatcgtattgcggtatcgctttccaaaaatcagcaagggaacctttgaaatagttgtcggggataaagagcttttttttcacatcgctctgctctaccctgtatccggcctcgcgcgccaaaatcaccaacttgcggataacgtcctgtccgcataaatcgatacgaggatcgggctcgctgtatccggcttcctgcgccatacgcacagcccggctcaacgggacatcggctcccaccacattgaaaatataattgagcgtaccggaaaccactgcctcgattttcaaaatcttatcgccgctgttgatgaggttgttaatcgtgttgataatgggtaaccccgccccaacgttcgtctcgaaaaggtacttcacatcacgcttgcgagcagtcagcttcaattcccgataagaatcgtacgatcccgaagcggctatcttattggatgccactaccgacacgttgtggtcgagcaaagtcttataaagcgcggctatatcgggacttgccgtacagtcgacaaacaccgaattgaagatattcattttgataatttcgtccttgattttttcgggcaaagcaaccatttcggaacggtcgagcagttcttgacaatgctcgacgtcaataccctccctatcgaaaaggcacttacgagagttggcaatgcccactaaccgaagctgcaatgccttcgtttcgagcaaccgttgctgttgcttgctgatttgttgcaacaagtccttacctaccgtacccacacctacgacaaaaagattgagcacttgcgactcggagaggaagaaagaatcatgtatgacgttgagcgctttgcgcaggctgccaagtgcaatcacaaaagatatattggtttcagaagccccctgcgcacaagctatcacgttgataccgttgcgccccaaaacgttgaacagttttccggcaataccgggtgtatgcttcatattctcgcccacgatagctacggtggcaagatctttctcggcttcgatcgcactgatttctccgacagccatatcgtggcggaactcttcgcgcaatactttcaccgccaactcggcatcggcattgcgcacggcaaatgtcgtattgttttcggaagatgcctgcgacaccaaaaagacactgatacccgactttgccagccggttgaatatacgtgaattgataccgatgacacccaccatgcccatacccgacaaagtgatgagacacgtgtcgttgatagacgaaatacccttgatggccttcccctcggtatgcgaattgtcctcggaaatgagggttccgggagccgaaggattaaaagtattcttaatgaatataggtatatttttgtgaaataccggataaatggtcggaggataaataaccttcgcaccgaagttgcacaattccatcgcttcgacaaacgacaaccgctcgatgacatatgccgtattgattacccgggggtcggctgtcatgaagccatcgacatcggtccagatttcgagctgcgaggcatcgagagcggtagccaagatagctgccgtataatccgatcctccacgccccagattggtgacatcgccattgctcttgtcagaggcgatgaatcccggaacgacggctatacgaggcaatggattaaaaccggctttcaccaaccggttggtctcctcgaaatcgacaatgtgtttaccacactgcatctgcgtcttgatgaaccgacgggaatcgtaatgctcggccccgtcgataacccggctgacaatcaacgaggagagacgctcgccgtagctgacaatcgtgtcgagggtctttaccgacaaatctttaatgagagacacgcctttgaaaatatttcccaactcatcgagcaatggctctacgagcgacagaagttcgtctctcttatgcgaatcgacagcgccatgtatcatggcaatgtgcctatctacgatttcacgaaaaccgtgttcataagcattaccgccttccactgcgattttggccgtaccaatgagtttatcggttattccccccagcgccgaaaccactacaataacaggctcccgacaactctcgactatatgtttgacactcgacatgctttctaccgagccgaccgacgtgcctccgaatttcaatactttcatatctggtgaatttctatcggtgttaccttccccaacctatggggaatcatacacaaagttacaaaacttagttaaaagccatacccaattacggtaaatcgagataatgaaataacgtcctcccccctaaggggtagtacccatagccgtaaccccgaagaaaaaatatgttctatatcgtaaccttgtcatcaatattatcatctttaaatcctctcaaacatgcaacaaccgagggatacaaccaaactctatcgactgccgcccgatgtcatctattttctcttttattgcaaaagtaatctattttttattttttgaataaaaacaagcacaaaatgatttataaaaatatcatttcttttacaattttgtattttacagacgtttttaaacgacattttgaaaatatctttttgccacatggaaagggagatagccgataatagggaatattttgccaaacaaaatgatattttcccccgcaaatgactatttttgtacaaccaaacaaaaaaatgtggcatacccgacgcaaccgaatcctattcgtttcagtccgtattcactactttttgtaaagaaataaatcattgatgtatgcctgaaaatataacatcggtccttatcatttacaccggcggaactatcggaatggtagaaaacagcaaaaccgggagcctcgaaccttttaattttcatcaccttctcgataaagttcccgaattgcgacaacttggattctctatctcaacggtacaattcgagccccccatcgactcgtcggaaatagaaccggactcgtgggtaaaactggtacacatcatcgccgacaattacgacttattcgacggatttgtcgtcttgcacggaaccgacacgatggcatacacagcatcggctctcagtttcatgctcgaaaatctgaacaaaccggttattctcaccggctcgcaacttcccatcggcatgttgcgcaccgacggcaaagaaaacctgattaccgccatcgaaatagctgccgccaaaaataccaacggtgaacctctggtcccggaagtgtgtatctttttcgggaaccatctgctgagagggaaccgtacaactaaaataagtgccgaaagtttcagcgcattcgtatcgaccaactatcctccgttggcacaggcgggggtacacattcactacgacgaaaaccaaatcgcccgcaccacatcgaaacctctgcgtccgcactatttgatgaataccaacatcgtagtactgaaactgttccccggcatatcggaacaaaccgtgcgctccattctaaacattccgggattgaaaggtgtcgtgctcgaaacgttcggatcgggaaacgctcccgtgaaggagtggttcctctacttactgaaagaggccgtggacaaaggcatcgttatcgtcaatgtgagccaatgtatgggaggaagcgtacaaatgagccgatacggaaccggttgcaaactcgaagacgtgggcgtagtgagcggctatgacagtacaaccgaagccgtacttaccaaacttatgttcctgttcggtcaccgctattccgccaaagtcgtaaaagaaaatatgaaccgctcgctaagcggggaaatcacattgacgttgcataattaggccaagtaaaaaacaccgagacacaagacaaccgaatcaaaaagaagcaacaatcatcggcaatcggtttcaagaaaaccgttcgaattttttggacataacaataattatgaacggtatggcaagagcgataagtagcaacacacaggtactcagctctatgatttgcgccacagacagcgtaatatagagaaagagcagcataacgaggttcttaatatgacctatcatacccgacatgagtttatatgcgcctgccttatcggttattttgcagggatagttacaccattgaggccaacgttgcaaaagggtgagtaatccatacaacgccaaagcgatgacaggaagaagaacgatcgtccacgtgtcgccccacgaatctatctcgccccggacattccagtgcagagggacttcttcctttcctccggtcattacccgaatggctattccaaaagaaatcataaggaagagtatcgaggggatttcttttatctgctttttcatggcttcaagagattattctaccgctctatcttttcccgcattccgggcgttgcccaataatctatccgggtagtatcgctaccgttttgatagagaaacagagcctcgacccccggcaaagaatcgaccaatgccttactgcgttccaatcccataaccataaaagcggtagcatatgcatcggcagtcatacagtcgggagccattaccgtcgcactcaacaacgtgtgttgtaccggataacctgttacggggtctatcgtatgtgcaatccgttttccgtccaccatacgataattgcgataattacccgatgtagccaatccggcatcggttatctgcacgatttcttcgatcgttccggcttcgccatcggcaatagtgggacggttcacccccactcgccacatttttccttccggattttttccacgggcgaatacctcgccgcctatttcgaccataaaatcatcgattcccttatcgaacaataactgtcctatcacatcgcaggcatatcctttggctatggccgaaaaattgagagtaatacaagtatcggactttaatacccgatgattttcaagagccaatttattcatacccacttgccgcaacaggctatcgacctgaacagaatcgggaataaccccttttttaaaaccgaatccccatgcattgacaagcggagatacggtagggtcgaacgtcccacccgtgcgtgtgtatatacgctgcgaagcattgaaaacatgttcgaaccaccggtcggtctcgaccggttcgttgcgattaatccgcgaaataatagaagtatcgttaaacggagagagcgaagcgtcgaattgcaacaaccggttcttgatttcctcggacaatgattcgggatatttataggttatgtggtaaaaagtgccgaatatcagcccctcgtcatatcgatatgtgttcttgccgcaacgacgtatggcacttgtcgacagaaacacgaccaaaaacagaacgactgcccaccatgaacgagcatatcttttatccataacctcctaaaaaaacaaatgttccaacaagattttcacgcctatccctatcaagataactcccccgacgacctcggcaaagttatgtatacggcggccgaactgacgaccgatataaaccccgaccaaagaaaaggcaaatgtgacaccggcaataactatcgtgggcgtaatcatcgtcatgttgagaaacgcaaacgaaatacccacggccaaagcatcgatactcgtagccaacgaaagacctaccaacgtacgcgtatcggcaggatcaatgcaacagggttcggactctcctttccggggccagccttcataaatcattttcattcccaaaaagagtaaaacaccgaatgctacccaatgatcgtaggcttctatataattcttaaacccaatgcccaaaaaccaaccgataagcggcatagctccttgaaaaactgccataaaagcggctatcttcaaaacacgggataacgtaaaaggcttcaaaaggacacccgatgtcaacgacacggcaaagctgtccatgcataacccgacagccaaaacaaaaagctcgaataatgacacttgttatttgattatgtttcggcgcaaagttatcgaaaaacagcggaataatcgaagaaaaatcggcaatatctctatttcaatatattttagattttcgacggctcgatacaaccatttgaagaataaacttttagcgaattatttgaaaatcaaagacaatattttattaacaaattgaatttcagatacttgaaacacagcactattcaataattctttctaatatagaattaaaataattgtcgggaaagacaataccaataatcgaattgttgtatttcatctttgcaaatagtccattaaaaaagacataatctcgcaaattatagcgacttttgtgattgaaactcattgcatcaattacaatacaatggcaaaaattaccgttcaaaatacagatattagcgttgtcaagtacaatgaagaagactacatcagccttacagacatggcaaaaagtcaattgcaagagcatattatcttccgttggcttagtcttaaaagcactatcgaatatcttggcgaatgggaaatgttgtataaccccgattttaattgtaccgaattcggtacaattaaaaatgcagcaggaagcaacaatttcgtgctttctgtaaaaacgtggatagaaaggaccaatgcaatcggcattcgttctaaggctggtcgctacggtggcacatatgcacatcgggatatagcatatcattttggcatgtggatttctcctaaatttcaattacttcttgttaaagagtatcagcgactaaaagcagaagaacaccagcaactcggttggtcggcaaaacgcgaattgtctaaaatcaactaccgcatacatactgatgccataaagcaaaaccttatcccgcaggaagttacaccggtacaagcaaatattatttatgcaaacgaagctgacgtactgaatgtggcgatgtttggtatgacagcaaaacaatggagggaagctaaccccgaactgacaggcaatattcgtgattatgctactatcaatgaacttatctgcttgtcgaatatggagaatctcaatgctgtattcatcgaacaaggtatgccacagagcaaacgtcttgttagactaaaccaaatagccattcatcagatgagcatattggaaagtggcaataattacaaccgtaagttattgaaataaagaatcatgaaaggcgacaagaattacgattatacagatgaattcagcgatataattcatactgaaagatttataagtgcggcagagttgtctgaactgttcttttctgcccccaaatggataacccttttgatgaagttccgtaatgtcgtgatgagacctttcggattgaaaaaagaaagaaagttatcggatttggtgcttatcgaatccgagaatatggcaacggtatgcaaaaatgataaacatcttgatttggaaattgtgtttatgaccgagagcatggaacgtgataatcaacgcatatctgtcagcacaaaagtcagattccataataatttagggaaatgttatttcgccataatcaaaccgtttcatattttaatttgcacgacactcttacaacgagcaaaaaacaatattgaaaaatctctttacagataagttgcttttaacgagataaaacagtcatagcttcatgcccttgcttttcctttgcgtcatgggtgggtatcttcacttcaccaaaaaagcgggggaagcgcagccgttcaaagctacgtttcctccgccatcacacacataacacagtatatatagaaaacacctcacggtgcaaatggttcacgggaccggttcggacggagtcaatttgtaggttaatttatccaaatctacctgcatgagataataaccctgcggagtatatgagatattttccccatcgagtttcaatcgtccgggacctccatcgccatactggtcgccctgcgcccaatcgggcagagtggttattttaaattctaccgcagcatcgggatttccagcgaccacaaaatcgacatatccctcataccgattattcattcgataggattgcagcacgggtgctgccgcaatatcccagttttgataattaccggggacatacagtttgggatacacgataggttcgtcataggccgtcaccgtaatgtcgcgaggagaagaagcgacggtatggtcggctgtcaacttggctactaccctgacgaacaaatcacaaggctctcccggttgaccgtccagaataagagtcgccatattcaatcgggcgacagtcactgatacataatcggcattcgattcggctaattgtataggatcgggaaaatctttccggttatctatctccaatgtgtaaacgggagcagcggggaaaccatagtctcccgacgaccatgagaatgtctcggctataaaccccgacgaggcttcgttcaacaccaaagccggttgtgcaagaggcgccagttcgggtgcagcctgcaagttatatttgggagtatccacatcgttacaggcgacaagtgccgacaagcctatccaaacggataatttaataaaagaagatttcataattctgtcgtttttaccgttagtagccatagttttgttgtatgccggggttggcagcgatttcctttgccggaataggatatagattatatttggtatccagcgatttaccggcatatacgcctcctttccacggccacaaataattaccggaggtgaatttttcgaaccgaatcaaatcggtacgacgatgcccttcccaataaagctcacgcatacgttcctgcaaaatttcgtcgagtgtaatatcgtctaccgaatcgtattgcggcatgcctgccctatccctcaaatagttcatgtaggttctccccgtttcccgatcggcagctccccgatatgcgcattcggcatacatcagatagacatcggccagccggaacaaggggaaatcggtatcgggataagattcggcacggcctgctgcattgtcccaatcggtagagagcagattagtaaacttcacgaccgaataaccgtcctgataggtagaaaggttggtattgttaatacttgctccttcgctgaaaaaggcataacgctcgtcttgcggagagaatgaaagtaccagcgtagaggtagaacgggggccggcccaagcatcgtttaccccataatttctcgccgagattttacctccatacgaacctacggtgagatacatcgtccccccgtacgaacgaatcgaatcgctatcgaaaggaacagtcataagtatttcgctttcattgccgcccctcgcataacggtcgttatcgccgccgaacaagtatttatacgtttcagccaatccatgattcgtcccggtattgtgccgagcgattattttttcacactcggcggcacacaatccgtattgcggcgtaccggtataaaccgcagcattgagatagagtttcgcccgaatcatattgacggcatcgcgtcctaccctcccatactgaggttgtaaaggaatagactcttctacggcattcaactcgtccagtatgaattgatatatctcggctctcgacttctgcttgggagcctccatgattttattctcctcggtcacaaaagagaccgcaccgaacagatcgatagcatgccaataggaaagagcccgcaacacccgagcctcggcccgataggtctgtatctgagcagcgacatcttcggggacatcattggcagccagcgctgtcggggtcgtattgcgtaaaaagtcgttacataaagctatctgaaaaaacacgcggctatacatgacatatacaaaaccgttggctgccgaccatgtggacatactcagttcgggtagtccggcatcgttccaacctaacacggcttcgtcggtaggcagttcctgcaaattccaataggcccgcaggtattgcgcctgtccctcgtcgaacccttgtatatcgggattaccggcagggccctcttgccccgacacggccaaaccggcatatactttggctaacagctgcgtgtaatattgcggattgtccttaaaatcggacaactgtatcacgttatcgtcgataggtttcaaatcgagatcgcccaaacaggaagacaaagtcatcgaaagagcgacgctcccgcctataaaacatttatatataaaagacttcatatttttgtatttttagaggttaataggtcaaaacgacacccaacgtataggtcgtgggccgaggataaacattattgtctatacccgaaaaaacttccgggtcgagccccttgtatttggtaatgacaaaaggattttgtaccgcaccgtaaactctcagccgcaacgcatcgtccaacaggtgtttccaagtatatcccagcgaaatgttgtcgcaacgcagaaatccggcattcttcaaataataatcgctcatgtattgctgggtttcgaatttcgccccacgccgcatgatattgctcaggaaacctgcgctgttgtacatcgcgctatatatcgaattttgagataatacgttgtcataaacataattgcccaagttggcccgcaaagagattccgaaatcgaaatttttccaattcatggtcgagttgataccgataacgactttcgggtcacggctgtggtgaatatatttgtccgattcgtctatgaccccgtcgccgttacggtcggcatacaatccctcgatgggattaccatcggcatcatatacttgttcatacaataaataactgtatgccggataccctactttatgagcctgtacagtattgcccgtacctccgcctatacctcctaccggaatgtaataatcggcactctcgcttttattcagtttggttattttattggagttccaagcgacgttcatacccaaatcccaagtaaaatctttattatcgataacttttgcttgaatattgaattcgataccctcgttgcgcaaacgtcccacattggtgtatatctcgttcgtaaggttggaccctgccggaacaggaatacgactaatcaaatcgttcgtctcgcgataatagtaatccaacgatcccgtaatgcgattattcaaaaatccgaaatcgataccggcattccacgtcgtagtctcctcccatttaatattggggtcatagccgttaggacgtatcgtataataatattggtcgccgaacggataggatgccgtaggataaccgatcgtaaacaacggcatatacgggaaataactgtcgctaatgtcctgctgtcccgtaataccatagcccaacctcaacttcaattcgctcataaacgaagtcgcccgttccataaaaggctcgttgataattttccaccccaacgcaacggccgggaatgcgccccaacggttatctttcgaaaagcgagatgtcgcatcgccacgtaatgtgactgtaaacagataggtgtccttataggtataattcacacgcccaaagaaggaaatcaactgtaaatggtcggtataggacgagacgaaccattgttccttatcgggcatcaatgtagtgcgggttcctccatctttataaaaacgttgccacgaatatccagccatagcgtcgagcctactatgtatcgactcgaaatcctgtttataattgagatagaagtcgagcaacaaattccgtttgagttgcctcaaccgttcgtcttgtcccagccccgtttttttattctccttgtaagtaagaggggagtcgggagtcatgagattatgttgaatactatgagagacatcgtatcctaaattcaagttggcatgtaaagccggcaaaaaaggcattacataatcgagctgcaagttacccacgctgcgatagacatcggctttcatggaccgttcgtcgataagcgataccggatttaccggtgcgatacctataaattcgtcggttccgggtttcaaccatgtaaaatatccgttaccgatgggtagattatcgacccgtaccgattgcgacgggtcgaaggataccgcgccaccgatagcaccttcgtcggcaaaacggttgtgcatataaaagcccttcacattggccgtcacactcaacgtattgtcgaaaaatttgggattcaacgttatcgaagccgtcaccctatccatagcagaggttttcaaaataccattctgattagtatagctcaccgcaacccgatacggcagaattttatacgttccacctacactcagattataatcgctactgaccgacgtccgcaaaatttcgtcctgccaattcgtattggccgtccccaataaattataagccgggctcccttctccgtaataatcggttatcacctgacggaattggtctccgtcgagtacccccactttattacgaggtgtattcacatacatattggccgtaaaattgatttgcggttttcccgaccgtccccgtttcgtcgtaataatgataactccgttcgatgccctcgacccataaatggccgttgccgaagcatctttcaatatcgtgaacgactcgatattatcgggagaaatcatggatagcgaattggacattccggtcactcccgaattatcgacaggaacaccgtcgataacgatcaaagggtcgttcgtcgcattgagcgatgaacctccacgaatacggatatcggcgccaccctcgggtttaccgccgttgagagtgactactacacccggtgtcttcccgaccaacaaatcttgtgcagaagtcgctaaacctgcatttatctcatcgggtttcaccaaagtaaccgaccctgtggcatcgctcttgcggacagttccataacctatcgccacgacttcttgcaaagccacagcgttttcctgcaaaacgatcgttatctgcgaacgattgtttaccggaacctcctgcgtattgtatcccaaataggaaactacgagagtagcatcgggaaccacatcgagacggaaccgcccatcgagatcggtcgctacgcccgcagacgatccccgaacaatgacattcgccccgataaccggctctcccgaactatcgactaccgtcccttgcacggccatacgttgcgccgatagcgaccacgacaggcaacataatcctaacagcaaccctgaccggattttcatgtgtagtttttcacaaacttttctcatatcagatacttttgatggttgaactcatagacgattgaccccgattgctccaaaagagcgaagctctccccacaagcgtttgtaccgtctgtatctcatagaacaacacctttgctgttttgtttgcccgctaagattatttcccttaaaaaacgaagaacgctcggggtaattcccgagcgttcttcgtttccatacgatcgactgcttaacttttcctaacaagaatataacaatagtctttattcaatatgagagaattgttaccataagccgtctcaaaacgagcaatgatcccgttattacgaccgttagactcatacaaatcgaacgccgcttgcgcatcggccaagtcttgtaccttatcgccgaaagcatcggtcacatacaattctttcaacgtgcctaaattatagtcggcatagttttgcaagaggtctttccaacgatcgatagtttgttcgttttcaggaatatatgccgaaatttccaaaacggtttccaatgttttgtcggaatcgaaattaaccgtatagttattacccttcaaatcgatcgcactatcgaaatagagatatgccatcgccgtcccgaaaagtatcttattgctgatcgcatagaactcttgcagagtttcatcgatattcgcacccacatacttacccaatgtactaaaatcaagaggtaaataattgcgacacatttctacacggaatttatccttatccatgataggacaacaatacacttttttctgtatgccgaatacaggatatatcaacgtattggcttccagagtcaacaacggaatcgtctcttctgtggtttgtttgatacctccctcgcccgtagcgtaatctttaaatttcgtaccgaggaaagttcctaatttataatcccggaaagaagatatcatactttcccacacttcaatccctttgttttcggaacttccggtcaaaaccatttctatggtagcaatcatcgttccatcgagtttaaacgtcgctttgtatcgattgcctttttgatcctgcacatacaggatattattttcctcatctttcgaagcatttcccacagcggcccatatctcgctcacatttttgtcaacgtaagcagacaaatcggaataggtcgtttcaaaataagttttagtatccccctcaggagttcctcctcccgtaccgtctccgggttcttctccttttttattatcctcactacatgataataaaacgagagatgacataaatatacagaaaaaccaagcaaatttctttctcatacttcttaaaactttaataattactactattttccttcttctctttccattattacatttttttctttactttgccgatacaaaaatataatattatactcaaagtcatttaaacaaatcggattatgaagaatttttatcttattttaagttgctgtgccctattttctctaacggcacatagtgaaaatttctcaggagacgactttaacggagcttgggaaagcgacggaggtaaccagaaagtacaacccgtaggctggcatgcattatattccaatattagcggtttcacatcgatgaaagccggaacagtttccaaaagtggagacgacaccaatgcctaccccaccatcgaaaacactttcgcaggcagtattatgtggggaaccaaaacgggttacgtcattccgggaatactctcattaggaactccgtggatatatgtaaacaccaattatttcacagccgcaacaggggatttgggtgtagacggaggtgtagaatttacgggacgtcccagtaaaatcaccttcaaagcccaatactacaatgctcctacaagcgacatagacgatgctgcccatatcaaagtctatctatggaagggctcggccgagtcgaccgataaaaacggagccaaccataccgacgaaatgagcgccgttctcgccgggaatgcgggtgcggccttgatagggtcgggagaattgaccatcgataacgatatagatgctttcgagaccaaagaaatctctatcgattatacatcacaagagattcccgaaaaaatgaacatcgtgttctgtgcatccaactacctcagtaaaaaaccggaaaaaccgctcgaagttgccgaaggaaactatctgcaaatcgatgacgttgctgtcgtgtacaattctaccggaattgaaaatacccaaaacgaagagttggaactgacggttaccagacaaggtttttcgataaacgacacctccgttcaacctgtcactattcacgaaacagacggtcgattgataaatcaagggcttgtaaataacggtcgatatgacttcccgttcaccccgggtaaaatttatatcgtaaaagtagggaacgctgctttcaaagtttgtgccctataaataaagttttatgaatcgaatctatatttacgtcatgctgttcagtggaatcttattcctcaacagcatgacgtgttttgcagccaacgaaaaactatcggcctcatcgcgccaaacgctcgatcaattaattcgatctggcaatcgattggaaaaattatccagacaggataaagatctgcgacttctcgttcaatgcgacgagcatacgaccgaaaacgatttactggaatgttttgttttatcgtatgtggcattgggaaacggattctatacgatatgtatttcaccgtcggaattgtctcgttttttagactctgacttcgtaaaaagagccgagcttcctcgaaaagcatccttatccttagatgaagcacgtacagaaacgaacgtagtactggtacaaaacggggagtctctttcatcaccttataccggaaagaatgtcgtattggggttcgtagactctggattcgacgtaactcacccggccttccgctcgtctgacaacgagaccctccgaatcgcaagattctggaatcaaatcgataacaaactactgtcggataaagaaaatattcttgccgaagggactgacaacgaagagcaaacacacggaacccatgtagccggaatagccggtggcagttatttcgggacaatagcgacctcggagtccacgacactcgacaagaatccctattacggagtagcttatgatgccgacttagtaatggtaggatcgacattggaagataccgatattctgaatggtattaaatatgtattcaactatgccgactcgatagacaaaccggccgtagtcaacattagcctaaatacttcttacgggccgcacgacgggacttcgcttttcgatcaagccatcgatgccatgctgggaaaaggaaaaattctggtcggttccatcgggaacgatgccaaaaacaaaactcatgcttcgatggaactcaacaatgcagagactcctgtactgacatttttcaaaccatcgggatacgccgccaacacattcgaagtttggggtgaatcggacgggtttaccgttaccgtttcgctaaccgactcgcaaggcgaaaccgtatggagttgtacctcgaacggtacggaccaatcgttttccgtccctgccgacttcaactattcggaaggcggagaaatcgcctactataccgaattgtggaacaacacgaggcgcatgtatagagtcgccttgaataatctcaatctaaaaggttacgacatacaaataggagtaacgggcgaaacccaacacatcgatctctggaccgacaaaaacagcggacagttcaccgacaacgggaaaagcacacatgtcaatttcgatgccgaccgtacattaggggaattgggaggaacaggaaagagaaccatttctgtcggaaactatacaacccgaaacgtatggacaaatttttcgggaaagaaacagtccatgttgatcgattacccgttgaataaaatcaactacacttcgagccgaggtccggcttcggacggccgagtaaagcccgacgtgacggctccgggaggaatgattttcagcgccgtatcttcttactccgattactataaggagagtagcgccaacactgtcgcccgggcaacgataaacgggaaaagctattattggggacaaatgacgggaacatcgcaagcctcgccctttgtcgccggagtcattgccacatggttagaagcaaatccagaactatctcccgaagatatacaactgattttgaaaaagaccgcccgccaagattcccatacaggagcatgtcccaactccatttacggatacgggaaaatagacgctctcgccggaatcaaagaggtgctttcaccgagcgccatcgacaacttgtcgacagacaaactatacaaactttatcgagacggaattttattcacatcgcaagcgggtaaaataaacctcatattatcgaccccggacggaatcataagatactccgataaaacagatgtcgagcccggaacccgaatcgaatggagagaactcggattgaataccggattgtatatccttcatataaacggtttttcggaaaagatatttgtaccataaataaaaagaaagggagaagatcaaaaaaacttctccctttcttcattatcccgtacattacattattactcatgatgatgtttcccgccatgccatttcatcatggctctcgggaatttcatttgggcatttttgaatttaaataatttttcattcgacagaaaggttttgaacttgtcgtaatattcccgatctatctttgccaacttctcgtccttttccagtaaaacttcggccgctttttcatactcgacatctgaaacagccgtttccgaacgtactattttccgagcaaaggttcgagcctccctgtctaccgtccattttttcccttccatctcttcatacaagggaaagaactgtttcgcctcttgttcggaaagcccgatctgtttcatcataaaatcccgacggaatttacagaaccggtcaaactgttcttttcgctgttgcttcgccttgtcgttattcttattctgtgccgaaaccgaaacgggcaatgcccacaataaaacggccgataataataaaattattttcttcataactacttctcctttaataatcgctatcggtatagagcatttcataagccgtgtaatcatcgacataataagcgatccactcgtcttctatcgtacttccatctgtcgccgaagccgtcatttccatatcaggagtttctcctttttccaccgagaatattcccgtaaacattttcatcataagccatataccggcaaacatggctgccatataaatccacggtcttacccgaagccataacgaaggttgcacgagttcgggaaattccctttccggcaaactttccgtcatcttttcggtgaaatcggcaaaataattgccgggcactttcataccgtgcttcctaccgatttcatctaacaggggagttttcttttccatagcttcaccttttgtttgttagacacgaaaataatgaaaaggtttaaacatgatcttgcagatattcctctatttttttcgccgcatggtgatacgatgctttcaatgcacccaccgacgttcccagaatttcggatatatcttcgtatttcatttcgtcgaaataacgcatattaaaaacgaggcgttgtttctccgggagttgcaaaaccgcttcttgcaaaagcctctgtgcacgatctccgtcgaaatattcgtcgctctctacatgagagagcaggaaatcatcggtatcgtcggccgtaagattccgtcgttcccgttcccgtgccagaaaagtcaatgcctcattcactgcaatacgataaagccaagtcgacaatttggcatcccctctgaaatactcgatacttccccatgcttttaagaatgtattttgcaataaatcattggcatcgtcgtgcgaaagtaccatttttcgaatctgccaatataacggctcactataccgggccacgacccgtgcgaatgcctgccgcacagtcgccggattctgtaactgctcgataacaatatcttcgttataatcttgcatattctctcttttcagcgggtaaagatacgtagagccaacgatttattcctaacatatttcattcttttttgttatttttattattcggtgaacttcataatgttttaatacattacctttgtttccgaaaaaccacgaaggaaacggccaattccccgacaagaggatagtgcggttttcctttacggttttatacaatctcgaaaatatggaaataaattctatactcttggcatttctcctcacgatgatagccggcctatcgaccggagtgggaagcctcattgcatttttcgccaagcgaaccaatacgaaatttctttctgcggcattggggttctcggccggagtaatgatatatatatcgttcatggaattaatgcccgaggcattgggtatgctcagcgagagtttcagcccgcgcatgtctaatatctacatgctgatcgcatttttctcgggaacatcgtttatcgcattgatagacttcttgattcccgaagacgagaatcctcatgaagtccaccgcgtggaagaactatcgggacaacaacgattgcaccgtaccggaatactgatggcactggctatcagtatccataatttcccggaaggactcgctacattcgcatcggcactgggcaatatcgacatagctattcccatcgtcatagccattgccattcacaacataccggaaggtatcgctgtctccgtacccatctatcaagcgacgggcagccacaagaaagcattttggtattctctgctttccggtatggccgaaccggtaggcgcactcatcggattcctgtttctgttacctttttggactcccacgattcacgcgcttctattggcattcgtatcgggtattatggtgttcatttcattcgatgagctgctgccgggagccgaaaaatacggtcatcatcactacggcataggaggcgtcatcaccggcatggcagtcatggcagccagcctcctgtttttcatctaacacccggataatatcccgtcctcgaaaaatcactactattgatgattgtaaagaaaatttttctcttgttactttgtgcaaaaattcaaagagagactcgctctttcaacaggtaaacaaatcttatgaaaaattttctgctcgcgttcatcttgggaactttaccatttcttgcaaccggtaaaccgataccggcgattaccgattctttgggaaaccgcatatataacctgaatgccattactatcatcagtaaccccaaatgggattcgaaactgttcgagttccccggttccatctcttatctcaacacgggcaatctcgacgaaatgaatatccgttcggtcaaggatatttctaccgtcgttcccaatctgtttattcccgattatggctccaaactcatttcctcggcctacatacggggtataggttcccgaatcaactctcccgccgtaggcctctacgtcaacaacgttccctatctggataaaagcgctttcgatttcgacttcatcgatattgcaagtatcgaagtcttgaaagggccgcaagggactctctacggaaggaatactatggcgggactcgtgaacataaagactctctcgcctttggaaaaacagggctcgaaaataaaattgagtttcgggaattacaacttatggggagtcgccgctactaccagccaaaaacttaccgacgatttcgcattctcgataaatgcccgttaccgacaggacgacggctacttcaaaaacgaatatacccgacaaaatagcggaagtacccggtcgggcggtggaagagtacaattagactggcgggtaaacaggcattggaagttgagtttcagcggtgactacgagggtagcgaccaacagggatacccatacgccggttatgacaaaaccctgaaaaagaccggcagcatcagttacaacgacgaagcctcgtatcgtcgcgacatattcacgtcgggtctgtcggctcaatatctccacgaccgattcatcttcacatcgacgacgggttatcaattcctcgacgacgatatgcatttggaccaagactttactccccgcgccatatttacactacaacaaaaacaaaaaatgcatgcggtttcacaggaatttgccgtcaaatcgcacaaaggcaaacgttgggagtgggtaggaggcttattcgggttttatcaacaaacccatacggacggcccggtagatttcagacaagacgggatagatttgctcatcaccaaacagaccaacgaccaactggcggctctcaaacagaaccctgcattagcgggaatgcccgatattacgatagatatagataatcgaaacctgtatatcgacggcatttacaaaacaccggcctacggtgctgccgccttcggacaagctacgctcaatcgtatttttatcgacggtttatcggccaccataggcttacgaatagactacgaacatacccgcatttaccatcacacccatgcgaccgaagatctcacagggcatgccaacgtcacgatcaatatgggtaatcgccccccgatgtcgattcaacagccttttatcctgcccctcggcatcgatggaaaggagtcgatgaacacgatagaactgtctcccaaattcgaagtgaaatacgctatcggcaataaaagtttcgtctacgccttggcaacccgcggttaccggtcgggaggatacaatttccagatgttctccaacttgatacaatcccaaatccggtccagcatgatgagcgaactgatgaagaacatgggaggcggtggaaacggaggtcgtcccgcaccgagtcgcagtgctgtcggaatgcctgccttcgaaaacacgaccgacgtgaaccaagccatctcgtataaacccgaacatagctggaattacgaaataggcggccgttcccagttaatcgaccaccggctgtttgccgatttatctttattctacatcgattgccacgatcagcaaatagccgccgtaagcggatatggccgtgtcaccaaaaattcgggacgtaccgccagttacggattggaggcttcactgcgagccaccccgaccaatcggctgttactctcggcaacctacggttacacccatgctaccttccaagaatacaacgacgggaaaaacgactacaaaaacaatttcgtcccttttgcaccggctcatacgctcgccctatcgggcgcttacaccctgcccttagacaaagagaccgacttgactttcgacctacaatacctcggccgaggaaaaatatactggaccgaagccaacgatgccgctcaaaacttttatgggctggtaaatgcatcgattatcctttcggggaaatacgccgatttgaaactatggggaaaaaatctgctgaatcaacattatcaggcgttctacttcgagaccatgaatgccgagaacttgtctatgcccaacagcttcgtacagtgcggccgcccgattacattcggcgcagatatcaccattaagttttaattctccttgccccctccgcagaactttgttccgcgggtctccctcataccgctaacgcaacaccccgtaaggctacggaacacggcaagggagaagattggatagttccggcttgctacataaaaaataaataaaaagcatctccctcctcctctatgttttacgacagcaaaatataggggaggtggccgcaggccggaggggttggtcttacaaaaaactcctattctatctttctcaacccctctccgtcgaaaactattgtttcttctgcttctcccccctatcgctatgcgacacaagggggagaagcgtaaaatctatccttacatcacaaaagagaatgtttctttaaccccctctcacccataccctgtggcattgcagggcattctcacacattcctccccagccgtgtcccgtaatatcgcagggtattgtggcaatcgatataaaaataatccttactattcacatacagaaatggctgtttcctcttgaaacagccattttcccatattttatctttctattcggcaaaagtcaagccttgcaatttatcccattctccacgggtaaaatcgggtatctgtaccggaacggagccgttgcgaacggagtagtcggtcaactcgaccagacacgaccattcggctgcgtcgtaaacgtccatatcaagaggcaaaccgtttttcaagcaatgaatcagacgataatccataatgaaatccatacctccgtgtccgcccactttgcgagctttctcgccgatctctttgcagaaggggtgttcgtacactttcagcagagagtcgagagtttgctggctgacaaactcatgcgcattgggttccaaagcgatccccgtaagcggatatttctgagcgaaacctttcgtaccgcttaccatgtgaatgcggttatagggacgaggactggtaacatcgtgttgtatcatgatggttttccctttggcggtacgaataagagtcgtgttcatatcgcccatgtcgatacgtgccgtatcctcgccggcgataccatgttcggctgcataaagatgcatacccttttgtgcattagacatggaaaccaacgtagccatgcggtcaccccggtgaatgttcaatatctgggcgacaggacctaatccatgcgtaggataaggattgccggcctcctctttctgagcttttaaccgccacatgtttttataaccagtcgccgtagtgtcgtaattataagaacgcaagtcgtggatataagccccctcggcatgcatcacatctccgaacaagccttgttgcgccatattgagcgttgccatttcgaagaaatcgtaacagcaattttccagcatcatgcaatggcggcgagtctgttcggccgtatttaccaaatcccagcactcggctacggtcattgccgccggtacttccacggcgacatgttttccctgtttcatggcatagacagccatcggagcatgagagtgccaatcggtgcaaatgtagaccaaatctatgtcgtcccttccgcacatctctttccaaacgtcctcacccacataaatatcagcgacaggaagtttgtgcgaagtaagtatttcattcgctttgtttacattcgccgaatccaaatcacataaagcgacaactttggcatcgggcagatagacataccgttcgatcgcacctttacctctggaacccagtccgataaaaccgactctcaccgtatccaaaggctcgcaagccaacttcaaaacactttcctgtccggcaggcctcgcaggttcttcaaacggattacgtggtgtcgtagtacaagcactacacaacaaaagcgcagacagcgcatagaacattttcttcttcatggtaatattttttagcataaataatgaatttccatctcacctcaaactcccaacaggccgaaaataaaaaagatttatacccagccctatggtgtcaaaaaggtcttttccgccctgtttagaggccaaatcaaagatagcgcaagagaacacaagcaaacgaatctgttcctatccaaaagcattctatctctgcattttacgcgaatatagagaaaggtgagtgcaaaggcaatcaagaaatctaatttccgatttgactatgccgaaccgcatcctatattcttttctacaaatataaggaaaggcaaccactcaaaaaaaagaacttgctcatttttttgctaagccatatctcatattcgacagagccaaagatacataaagaaaaactcattatgaaaaacgacaacattttttatctatcgaaaggcttcgaaagagaaaaatctcttaggtatctataaggttttaaacctttatcaaaattaaaaactccccccgggaaaaaaccaacgtttaaaactgctgttaaaagcctgtgttatattttattattttaaatgtttgtgttttattttttatcttttacttgtacaaatatagcgttctatttttaaatcgaaaactaattctcccactttttttcgcttttgacttattttttagaattagagccatatttccacaattataaactatttcgatagaaattagattttagggagcttgctttctaaaaatatattctcgatacataatatcctccgtccaaaaatcgaaagaccgaaaaggaatcacattttttctatataaatacggtacaaaaaagaagtcatgcgggaattgcatattcttagataatgagccataatctcctatttccttttcgaaagaatccctaataaaacttattaagcgatactatcaccgaaacgattaaatggtcgaataaaacgttgatttaaaccacgaaaaacaagaatcaaccatgattaattcaaacaaattataaacgagtatttactaaccttgattattaacaaacaagcagtattatgagaagacaggtgctacttctgttattttccttatttgctatagtaggtttcgctcaacaacgcaccgtaacggggaccgttgtatctgccgaagacggactgcccgttatcggggcatcggtccatgtcaaaggcacctcacaaggagcgacgaccgacttagatgggaaatattctattaaagtcaatgaaaacgcaagcctaacattcagttacgtgggtatgcaaccgaaaacggtgcaggttggaaatcaatctgtcatcaatgtaactttaacctcgtcatcgacacaattagacgaggttgtcgtaacagcgatgggtattcgggaagaaaagaaaaaactgaacttcgccgtccaaagtctaaatgccgacgaggttactgccggacaatcggcaaacttcgtaaattctctacaagggaaaattgccggtgtacaagtatcagggagcggaggttcacccaattccagttcccaaatcatcattcgtgcgatttcgtccatcaacttgggacaaaataacgagcctttgtttattatcgatggaatgcctatgcgtggaggcggttcgtcggccggtgacatcaacccgaacgacatcgaaaacatgaccgtattgaaaggtgctgccgcatcggcattgtacggctcggaagcagccaacggtgtaatcctaatcaccacgaaaagcggtaaaaccggacagatcgtcgtgaacggtagcgccagcgtacaaatcgacaacagcgtaagaatccctaaaattcaacagaaatatgctccgggaaatctcggattctataaagaaaactctgtaaccggaggttggggtcctcttttgaaagaaggggaaaaaacctacgataacgtcggaaacttcttgggaaccggattgtatcaaaaatacgatgtgaacgcttcgggaggaacagacaaattcacagcctatgcatcgttcaactacacttctaccgacggtgttgtccccgaagattacaagaatcgcatgggtgctttgttaaaagcgactttcaccccttcgaaatgggtaaaaatcaatgcatcattaaactatatcgatacgaaatcccgttcgttcggaaacgaaatgagtactatatatacatggcctatcaacaacgatatgcgcgtgtacaaaacaccattggggaaacccgtttacagcatagaagacggtggccgttacgacaattggaatgcccttacagacgccaataagattgcggccggagtaagcccttattggggacgttacgaagacggaggggagacacaatcttcacgtaccatcttaaacggatcgatcgaatggactcccataaaggatttgaccttcaccggtaaaatcgcatacgacaaaggatatacaacttccgacgcctacgccaagccacgcttcgataaagacgaactggacgagagcgttatttccaaatatctctacaaattcggttcttataaattcgaacccagccgtagcgaactgctcacggtacaaggattggccacatacaaagtagatttgttcaaagatttcagcatgaacctgttggccggagccgaaatcatgatcaacaaaagttatgaagccactatggcgggacaggagttcgtattggaaggagactattacagtttcaacaatacgaataccgaaaactggctgaaaacgggcgactaccccatttcctatttccgctccaagaaaaacaaatacgggtatttcggagaattgcgattcgactataaaggaatcgcccaattaagcggaacagcccgctacgacggttcctctaccttgaaacaagccgaaaaatcttcttacttctatccttcggtaacggcaggtttaattttcagcgaattgttccacatcagtaacgattggttcagctatggtaaaatacgcggaaactgggcacaagtcgggaaagatgctactcccaacaaatttaccaaagcctatcgggaagcctctacattccccgacggaggatatagtgtcgaccccacagcttcttatgccattacgctggaacccgagatgacaaagtcgtgggaaatcggagccgatttaagattcttcgacagccgtacccgtttagatgtagcctactactcgactacggtaaacaaccaaatcgtaaccgtgagagtttcgccttcatcgggaactattctacaagtccgtaacgaaggtagtatcgagaatcacggcgtggaggccacattaagccaagacattcttcgcagcaaagatttcgaatggaccgccaacctcaacttcgggttgaatcggggtgtcgtaaaatcgttacccgaagacgtgagcgaagttcaagggacacagttcagcgatatctatactaccgcctatctaaacggttcgacgacgggtatttcaggcaaggactatatgcgtgctcccgacggacaaatacttatcgacgaggacggatatcccattatcaacccggccaagagcgtatatatcggtaaccgcgagcccgacttcctgatgggattgagcagtacgttccgatggaaagacttgactgtatcgttcttgctggacggacgtgtaggaggagacgtatataacggaaccgcacgctcgctttttaccaacggtatgcacaaatcgttggagaactaccgtaaccgcgaagtagtcgtaaaaggtgtagtcgcacaacccgacggaacttatgtacaaaacaacaagcctatcattttgaatcagaccaacctgaatacctatttctatggcgtaagctccaattttatcgaagacggttcttatctccgactgagttacgtcaccgtaggatatgatttcacacggttcttgaaaaaagggaatccctacattaaaggattgagagcttccattacaggccgcaatctcttcctgttgaccaaatattcgggttctgatccgcaaatttcaacttcggcagcctacggtacaggaacgatgggtatcgacaatatgtctatcccggccacccgcagtttcaatttcactataaacgcaacattctaacatcaaggaaccatgaataaatataaagttatcatattatcgttgttaatcagtttcatgggcgcaagttgcgaagactggttgtacgacaacgtcaacgaagatgccgctcatgaagttctgccccaacaggtattgcctgtcgtgctgttctactcggctcaacttcaattcgaccatgccgaatacggcgcttatctgacccaaacattgactaccggcggacgtaaccaaacgtcgagtttcgcatacaaatccggctggggcgatttcctgacgatgaaccgtcacccgcaatggcgtcgccacttctacgatatcggtgtcaatgccaaagaaatcatcgacgaggctcacgaagcacaagcgtggaatctggaactcatcggccgtacccttcggttaatgtccacccaaatgacaaccgacctgttcggagacatgcctcgttcggaagcctatgaatcgaacagtccgcactacgatacgcaagaaagcatctacgagtggatgaatcaagaaatagaagagctgataggcatgtatgaagatcccacttataccgaagccgcgaccaatatacctatcgatcaatcgatcgaccgtgtcttcgccggagacctaaataaatggaaacactatacctacgccttaaaagcccggttattgcttcgcaaattgccgaattgggaaaacaatgcggcgacatgccaagccatcattacagctgtcaaccgggcactcgaaggttgggaagatgtactttatcgtttcgacggcggtaacggagcccaaaattctccgtggggcgaagccttcggatcgaccgaacaaggaggtctcggctgggaaggacgtggcaacatgttgaattcggctgttcctaccaaatatttcatggaaaatatattgggcgtattcgaatcgcataacaacctgaaaggctgggcggaagatcctcgtatcctcgctttcatgagtgcacggccggggccctcgggaacgagcgattccggtactgaaatgcgttatctcgataccaatatcggtatggacgtttcctacaaagtggataactaccccaccttgttccccgaagtcgacggcaagaaagtttcggtctatacgcaaaacacaggttatgttcccctcttcctcgaagaagaactcctgcttatcaaagccgaagctacttattggagcggcgacaagccgacggcccgttcattgaccatgcaagctgccgaaattaatttcgaccgattcaatctttcctcgatttatggaagcagttatacccgctatcgcaataactatctgggaaatgaaaccggaacaggaaactacgtaactacctacttccctgccgacggattcaacatcgggcacatcatgcgtcagaaatatgtttgcctctatctgcaacccgaacaatggaccgatatgcgtcgctacaattacagttgcgaggagaacggaatacaatatgacaacacctatgtatatcccggattaaaacggcccaataatatttatgaagctcattggggagacgatcccaaagcatggatcaaccgtatcaactacgaccccgaaacagaagaaaaatacaacaaagccgaattggaaagactgggcgcatacaaaaactatcaatggttgcgcaaacctatgatctggcaataaatagaaaagaatcgaagtattacaacaaataataacactcgatatgaaaaacaaagtaaaaatagcgtctcttctgctggcaatcgccggattatcgggttgcgaaatcaacgaccctgtaaacgattgggcagacttgggacaacaaaccgcatacgtttattgggagctgaaagatgccgtgaacgccggtagcgacctcgatttcagagtttactattatgccgacggcagtacgatagagaaagcccaagtttggtatggagtgagcagtacgatcaatcgtgccgttacatgcccatacatcagttacacctataccgaaagcgagaccgacgaagtagtcgcctcgcatttggtgaaagagttcgatcctcaaaccgtgtcgtgggacgatgccaagtcgtcctacattctcgacgccactttcccggtctcctcttcatgggctagcgtgacatgggccagtgtaggaagttccgattttaccgaaactttattcaagacctattatcccggcgattacgagaccaacttccgggaggctctaaccactcaaatagagaccgattaccacggaaacatgaaaaaaatcgttgtcgatggattcatgaaaatgaccgaagaggaatatgaggctctcttcacgaaaacgaccaacgaagaagtatatgaaatcaccgacgagaataaagcccggctcgatggcatcgttgcagctctaaccacgcccgaactcatcttcgacggcaaagaatacggagtaaactacaattgcacctatacgttgagcgccaaattccaagtaagcgactccaacggtgtgataagcaataccgatattaaaaatattactgtcaactaatagaaacggaaagaacaatgaaagcattaagaaatataagtttgacggttgtcttgttggcttcgttatctgcttgtgtggaaaacgatcctacttacaatgtatatcccagtgacgatgtagcgtttacctaccacatcacgaacgaaggatacgaactcgactatctggtaggttccaccatacagtttaccaatacatcggccatttcgggctcatgtacttgggacttcggcgacggggaaacttcgaccgacgttaatcctacccatacatacagtttacccggacagtacgaggtaaaattgaccgtaggcgacgattatacgactcgtcccttgcttatcaacgacattaaacctacgatcgtcgccaaaacggaagatgatagaatatgtgtcatcaacgacgtcgaagtgactttggaagtgaccttacgaaatccggccgcatcggaagaaccggaatatacatgggtattgcccgaaggaacgaccttgctcgatcacccggaaataacaggtaatacctataccggcgaaaatccgggccgattagtcttcaaaaacataggttcacaaaccatcacgttgaaaaccactctcggcggacgtgcgctccaagatgtaaaagccaatgtacaagtaggtacgcccaatacatcgaaaacgctctactatgcggtaaaaagtggaaacgtaatggcctataagctggattataatgttcctgagggaagtaataactctcccttcgacttaggcgtaaaagcgggagctcaccctctgaatatgctgttccataatgaagttctattcgtgctcgactgcggtacacaattctcgtatgtcaacgatgaagatggaacccggggtgacggaaaaattacagcggtagccaaagacgggagcagtatggaaaccgttctctccaacgtcggcaatgctgccttcaacgatcctttctacggttggatagacaacgaacaaatctatttcgccgaccggaatacaggtatccgacgcatcggtgtcaacgaacgtaacttggcactcagcaccagcgatgccaaatacgattatttcgttcagaacaatcggctcgaatattacggtaacccgtggcaatacggtgcaatgaatgcctgcttcgccaaagcggacggattgtggtattggggcaaaacatacggcggaggcggtatcttccgtttcgcagaaagcgatatcagccctgtggacatcagtcgaggaaccaaccctccctatcctacgattttccccgatgaattcgtgaaatcgttcgtgatagatgccaccaatcaaattttatatgccgtcattcgagacaaaggactctatgccgttcctttaacagatattacggccaacgacgcgacaaagaccaacacgaaagccgagagcaaatatctcgtagcgagcttcaaatcggacagcgaaggaagcgtaggagaatatgtcgatgtctgtcaaatggtactcgacagctccgacggttcggtttacttcggactccgtgccgaagaaggcagctcggagacatcgggaataaaacgctggaatcccacgacgaaaaagctggaaactatcgtatcgggggtcaatgtctatggtatagcactgaacaacgagttatcgaacctattctaaaaacaaaagcctgataattttccgccggtctaaccgaccggcgggaaaaaatatcttaactaattagatatgaaatacatcgcaaaaatagcaatcgtactgtttaccttttggttagctatcccgacaatcgctcaaactcccaaaaaagaggtcagagcgttctggttatcgaccgtatggagattgacgtggccgaaaactaccgttatctcgaacaccggaaatgcgcaagaaatccaagaacaaaaagacgagttaatcatgttgctcgactcggtaaaagcagctaatgccaataccgtttatttccaagtgcgcggccgttgcgatgcgatgtataaatcctcttacgaaccgtggtcgagcgacctcgtagcgacacgaggcatggacccagggtacgaccccttgctgtttgctgtcgaagaggctcacaaacggggtatcgaaattcacgcatggttcaacccctaccggtatgaaagcgtactgcaccaatgggacggaacgcctcaaaattatcgggaatctcacccggaatggctcttagactattcggacggttctatcttgaatccggcaatgccggaagtgagagaccatatcaccgccattattcaagaagtcgtacaaaactacgacatcgacggtgttgtcttcgacgactatttctacatgtcggggacgaccgacgacatggacgacgagttataccagcaatccaatcccgacaacctctctcgggccgattggcggcgtcagaatgtaaataaactgatcgctcaggtttaccgaatgattcaatcggaaaaaccttatgtgcgattcggtatctctcccgccggtgtatggtgcaccgatgccacgatagccgagcgatacggcgttactcctaccccggtaggttccgactgggcgtacgacgatatcttctgcgatcctatggcatggatacaagaacactctatcgattacatatcgccgcaaatctattggacgataggatcgagcagcgactacacgcttatcgccgaatggtggagccaaatcgtaaggcaattcggttgtcatttttattcgagccattcggcatccgatttgagctcggccaaaatgccatcaaaatacggaaaaacgacaaccgggacactatcgttcgatctaaacggagaaaaagtttcttccaaagcgctctctcccatcgaacggaaaacagccgaagaaaacgaatacatcgtcgatggcgcaaccgcttcgttcaaaggctccgaactggtcaatcaaattaaagtaaaccgcacatatgacgaaacgggagccccgggaagcgtattctacaacatgcgcaaggtaacccatacttcgggaatgctctccttgttgcggtcggacgtttacaaatacccggctctaataccggccatcagctggaaagcgacctccgatcccggattagtatcgaatatcgctttcactaacggtcaattatcatggacgggagcagagggtatgcgatacgccgtatatgccgtaccggaaaatgcggcacaaacgaccgcttgccgggatgcccgctatctgttggggctctcatacagcaccgactattccataccgacaatttatcgcacggggtatacatacgctgtttccatcgtcgaccgttacggaaacgagtatgcacccttgttcatgggagccacggcaggtacaaacgaagccgtgacattaaacactccggtaaacaacggtacggccataggcaactacgagttcacgtggagcagtgtcgccgatgcttcctattatatagacattgcccgcgacgatttattcaccgacctcatactctcgcgggaaaccaccggtacttctttcccttcgagctatctgcccgacttagaaaaagggacttattactggcggattcgtacacgaaaagccaactgttcggacggtatctctgccgtatatgcattccagtccggtccgttcgaaatagaatctccgaccaaaggagccaccgaagtgtccgtcacgccttctatcacttggaccgaatatccaaacgctacggaataccgactcgaaataaacaaatacgacgacttccgctctatgggtaaagttctcgaccaacgatataacgaaaactccattaccctccccgaaggcgtattggtaggaaatacgaaatattacgcacgcgtaaccgcatacgcaggctcgacagaaagtatcagtaaaacgacgaatttcacgacagaatcgaaagagccgtccataccggtcattctatatcccacgcagggagcgacggtcgaagccacgtccttacaagtacgctgggcagaagaaccgttcgccagcaccttccgtatcgaattacacaccaacgaccagtttaccccgatacgaaacgtaaaaagacagaccgtaaacgcattcacttacgaaacggaattcgacaacttgaccgacggtacatggtatctgcgggcccgctcggaatacataggaggcgaaacggaatattgcgatacaatatccttcactttcaaaaattcatcgggtatggaaactctcgaaaagaggggtaaatgttatgtcatacagggtgagaatcccgctctcgtcgtaggaaacgacgcacgtcacataacggtcgatgtagctaacttatccgggcaaattatcgggcgtttcgccgatatggaaaatccggcagcaggagaccgtatcgaattgagcgggcttgtacgtggagtctatgcggtcatcgtccacatcgacggaaaaagagagatattgaaattgatttactaacaatctgatatattgaattatgcaatataatttttcatttatttattcatttaatttatttttatcatgaaaagattattacttgggatggttgctgcatgtatggcaacatcgatggtcgctcaagatccggcgacgtatgaaaaagcaggtgaatacacattggaaaacttgtggatgaaagctgccactaccgggaataatatgggagtagccgatcagttaggtggagctaacgactcccgtggtatgacagttaaaggagacgaaatgttgtttgcgtacagagctgcttttacgggtatcaaaatctacgatttgaaaaccggagataagaaacgtgatgttcaattcgacgcagaaaagtttaaaatcacctacacttataccaaaatcgatactatcgtaaacgctcccggcgacacgacattccaacagacaccaatggaagaacaaaaaacgcccggattcctttgcaacgatattcaggtagatgatgccggaaacgtagttgtattcaacatgtctacggcattgaacggcgaagctatcggcgtttggaaaatcgacatgacgagcggagagcccaccaaagtaatggaattggccaacaaagatggtctgctcgacggctatcgtgtcgactattttgccgtgaaaggcgatgttacgaaagatgctatcctcatgttcccggtcagcagcgggaaatatgtgattcgttgcgatattaaagacggacaattagccggacaaacaggtgactatgaaggttataatttcaaagttatcgaaatcaaatcctattatcccgcagaagctgtcgataacggaaccggacctcgtgtttcaatcatcgataacgactacttctatttggacggcttcaatagtgcagcatctctctacgacatgagcggttctttgatcgaaagcgtaggtgatgcccccgaagaatgcgctatcaaaaacgtaggaaacaacggtatctctgaatttacattgaacgacaaacctttctgcgcatacgtaatttccaatacggccacgactcctgcccaagcatggaatattatcgaaatgggcgaaggtcctacatttgccggtgcaacttattactggacattcccgcaaggtggtatgggcgatatttcgaaccctgttcgtaccgcattgccccgtatcgccaaagtagccgacaaaaacggtaaagaagctgcttatatcgctgtctacgcatcgggtagcggagctgccgtttacaaaatgactcccgacggatatgacaatgactcggaatcgggtatcgctaatgtagctaccgacaacgtgaagatattcgtaagcggcgatgccatttatttctctggcatggcaaacgctgtcgtttacaacttcgccggacaaaaagtaatggaagctgccggtgtacaatctatggccgctcctgccgccaaaggcatttacattgtaaaagcggttatcgacggtgtcgaaaaagttcaaaaagtcgttgtgaaataagcccttcgcactaagcgacatttaaatctatttcttagaggaagggcggtatatggctatatatcgcccttccctttacccttccctatataaaagttcaaaaaatattcaatctgcctatcgtatctcaaaagtaaatgaaactccgacaaacgggagattcgaggataggatttgaaaaagaaactgaaattcattctatctatatcgattaaaacatttctaaaccaatccatttgtattaaacggttgcccctatgaaaaagatttttacacttttcgcaatttttgcttgtttacccatactgctcagtgccaaaggcccggcagtcatcggtggcagcacctacacggccgataccctctctcattacaaagtaggtcccggaacctattacaccgccattcatttctatggtcccaaagacatgagagccttttatttggaaatcgacgctaccaatccttatctctctttccaatcggtcttgggtcgggattcgttggttacgtgcgaaggcattaccaacatggccgcccgaaaaagcaaagaaggcagccgttatttcgccggtacgaatgccgactttttcgctacttcgggagctatcggaactccggtacacggatgtgcggtagaaggccaattggcgaaagttcccgtatcttcgggccctcaaacatctttcacgacaaacgacgaatgcttcatctcgttcgtcacttatgcaggtgaactcacccataacgaaaccacatataccatacacaacgtaaacggaagccgaagtaccgatcaattagtactctacaaccgttatgtcgggaattatacccataccaatgcttacggatatgaaataccggtaagtctcgcagacggagagaaatgggggctgaacaagaccgtgaagctgaaagtggcaggtacaggctcggctgccggaaacatggctatcgccgaaaacggagccgtattatcggggcatggaacgtctgccgactttttgcaaaccttgcaacccggcgacgaactggaaataaaaataatgctccaactcgaagacggcagttaccccgacattaattgcatggtaggcggggaccgtaaaatattggaaaacggagaagttctcgaaaccgattgggcagagctccacccgagaacggcaatcggttactcggcagaccgtagcaaagtgtacatgctggtagtcgacggacgtcaaggcggatattccgatggcgctacgaccaaacaaatggccgacatgatgaaattcgccggagccgccaatgccatgaatctcgacggtggcggatcgagcggtatgtatatcgaaaaatacggacaggtgaacagccccagcgacggacacgaacgcgctgtcagcaacggtatcttcgtggtatcgaatgccccggacgacaataccgtagccgaaatcttatgcacttcggcctactactctctccccaaaaacggcatattcacaccccatttcatgggatacaaccaatacgggtatctgatagataccgatttacaaggcgttacattgcgttgcgacgagtctctgggatatataaaaggaaccgacacattcgtagcttcgggtgacggcaaaggaaaactatatgcgacttacaatggcatagaaacctccatcgatatagtcatcaacgagccgcaaggtcttacgcttcgactcgattcggtcatcaacgacgggctttatgaatatcccatcgaagtaacagccatcgttaacggagagagtatgctcatttctcccgatgcattttcatggaccgttcaagacccgacgatatgcgccgtcaccgagggacttttaaagggcatcgcgaacggtaagaccgatatatattgccgtcaagacgactttaccgacacgctatcggtaaccgtacaaattcccgacaggcgcaacagagcgatagacgatttctcggatgcctcgtcatgggacatcaccaactcagcattgaaagacatatcgatcgtaccgacagcacagggaacagaattgcgatatacattcagttcaggccgcgctccctatctgcaaatcgccaaagacatttacctgtacagtctccccgactccatgcgaatcacgctcaacaccggagcgacccaagtgagtaaaatagcactgtcgatgaaaaacaatgcatcgagtacttccacattgaccgaattcgaaaatataccccaaaataccgaccatgttatctcgattcccatgaacggatatttcgaaaactaccgcgacatgtcgttatatcccgtgaaattccaaagtctgaaattatttatcctcggttcgtctcaaacggcagggaaccaatatactatcgcactcaaagaattttcactcatttatgacggtatcacggtaaacgtatcgaatcccgaaatagcttccttgctgcgggtttaccccaaccctgtcgaagcaggcgaatctcaaatacatttcgttttaccccaaaatgccgatgtaaactgtgaattgtacaacctcggcgggcagcttctaaaccgagtagaaatgggacaaacaccggcgggagaaattaccctgccgataggtaatttggcgagcgggacttacctactgaaaatatatcgtaacggaatcgccgatagcgtgaaaatcattgtcaagtaaaaaaatcaatataaaaaagtcatgaaaaagatattcagcttccttctttccggggtattgtctctctttatttatgcttcgggaataaccatcggaggcaaaacctatgcggtagataccatcgtacactcgcacgatataggtcccggcacgaaatatgccttttacgatatacccgcctatccgcttaaattccatgtcatggaagtggaccttaccaacccatacgtagacatcgagacttgccttagcggagacaaagccgtcgcaacggagactccgtcgagcatgtcggctcgcaacaaccgtccggggcacgaagtcctcggtgcgacgaacggcgatttctatcaatttcaagaccccatcgaaataggaattccccgcagcgggcaataccgtcggggcgaatgcgtgacgaatccggtagggcgcgcctcattcgtcctcactcccgatcgggttccttacatcgaccgtgtaaacttcgccggaaccgtacgttccggcgataacagccatcggttacacgccgtaaacatgcaacgtctggaatgggaaacagaaaccgcccccaacttcatgctgctatacaccaacgcctacggtacggaaactcacgccaccaccggcggaacgaaggtcatgctgcatgccaaagagggcgaattgtttttcggagcgaacaaaaacatcgtgtgcgttgtcgattcggttttcgccaatccgggcatatcgcctattcccgaacaaagagcggtcttatacggagtaggcacagccgaaacctttttgaaaagcctctcggccggcgacgaactgactgtctttttaggtacagatcttgcctcgactccgggtttgctgaccgacttcaaggaacaaatgggcggaagcgaccacatcatattaaaaaacggagtcccggccgacgtatgggacgaagaacaccccagaacatgcatgggtatttcgcaggataaaaccaaagtctatcttatggtagtagacggccgtcgggcaggatactcggcaggggcaaccctcagtgtattaggcgatctgttccttgccataggcgcatacgatgctgtcaatctcgacggcggaggatcctcggcaatggttatcaaccaacaaatagtcaatcgaccttccgataataaggaacgagctgtcggtaacggcgtactagtcatttcaaaagcgccgatcgacgatgttaccgcccggttggaattcgagccgattcactatatacttccctcctactgtcggtttatcccccaagtgacggcatacaaccaatacggattgatcgtaaaccccgacttcaaggattatacgctttcctgttctcccgaaataggttacatagacgagagcaatgcattcgtagcttacggtaacccgggacacggaaccatcacggcaacctacaacggcatatcggtgacaaaagatgtaaccatacaagaaaccgatttcgccatgcgtctcgactccgtaattttggacggatacgaagagtatcccatcgaaatatcggctacaatcgacgacaaagaattcgtactgaatccgtcgacccctcaatgggaggtcgccgacccggaaatatgcggtatatcgaacggcgttttatcgggtctgaaaaacggcgtaacgactgtaactggaaaactcgatgattttaccggctctttgaaggtaaaagtagaaataccgcaaactcatattcaacaggccgaccagttcacctccggctgggaactcacaagtatctcggcgataaacgacgtggctctgacaccccatgcgaatggagaaacaaacctcgaatacacatacaaaagcggcagacagccttacatacaaatggctaaaactttcagcttttacagtatccccgatacattcagaataacgctcaacacaggcgacaccaaatgttccaaaataaccatgtcgatgaaaggcggacttatgtcgacctcgcaaatcatggaatggcccgcagtgaaccccaacgaagacttcacctacgaagtcgccatgaacgacttcttggacgataaagaagacctcggcaattaccccgtacagttccaatatcttaaatttttcttggatgcctcctcacagaccgcaggacaaaaatataagattcgcatcaaaaatttcgatttggtatacgacaaagtcactttgagcgtcccaaacattgcattggcatccgcgttacgagtttttcctaatccggttaaagccggtgagacagacgtatatctgcaaatcgaagaaccggccgaaatatcggtacaaatgtacgacttgaacgggaaactgctcgtctcgaaaaattacgggaaatgcgaaagcggaatcatagccatacccatttcgagcctgcaacccggcaactatctgctgaacatcaacaaagacggtaaaagcgatgtcgccaaactgattatcaaataaatcacttattcacaaaatcatgaaaaaggaactattcgttttcgccttatctgctctatgcggattaagtgccgaagcaaccataaacatcgcaggcgtggagaaacaggtagacacgctggaatgccgtacggtagggccgggcgttcaatatgtgcgtatgcacatgcccgaatatccactggacgtctataccatgactatcgatctgaacaatccgtataacgatgtggatgctttcatcgggaaaaaccatgccggaagtaccgaggccatgacctcggcatatacccgattgtccactcccgaacatcaatccatcggatcgataaacggtaacttctggattgtttcaggacaaaatatggacgaccgcctgctgggacaaccgcacagcggttgtatagtgaacggagaaatagccactgaaccgaatggctggaaccgagccggacgaggagacgaaatagagaaattgcaggagataggattcgtcgttctcgaccaagacaaaaaaatgtggatcgacgacatgaatttcgaggcgaaagtcataaacgccgccaacgaaagtttcgccatcgccgaagtgaaccgtatccgcaatgaaaacgaaattgtactttacaaccactttaccggacaaacgaccagcgacatcgatggaaccgatgtactcatcaaacccgtcgagggagcatcgtgggggcttaacaaggacgtggaatgcgtcgtaacccgtatcgtgcaaagcaaaggcggaaccgaactcgaagagggtgaatatgctctttcgggaaacggaacaggtgcagagtttctaaaccaaatgaatgtcggcgataaagtaaagataaatacaaaacttactacccgcaccgacaatctgattcccatagccgagcaaatgctcaccggtaacgctctcgtcatgagggaagggaaattgactccccgaaacgaaaacgaagcatataactcgcaaacctattcgcgctcgggtataggcatgtcgcaagacggaaagacgctctatctgatcgttatcgattacaagtcgagcacttcggtagggacaaacacggcgacgatgtgttacatattgaaacaagcgggagcttggaacgtggccaacatggatgccggaggatcggctcagatgatgttgagaggcaagctcgtcaacaacccggccgacggaaaggaacgtccggtatcgaacggattcatgatcttcaccaacgctcccgaagacaacacgttgaacagccttgctttcgataattacaatttggaagttccttcctactcttgtttcgagccgactattctgggatacaactcatacggcgtattgatcgatactgatgtacaagaatttacattaagttgcgatgcctcgttaggaaccatttcttcggacggaaaaaaattctatgcctcgccgaatgcgacttcgggttaccttcacgtcacttcgggaacagcgacaggaaaaataaaggtaactgtaaaagaagcggatatcgtcatgaagaacagtgaaatcatagccgacaaggctcacccctactctctcgaagtcatttctcatatcggcgaaaacacgttcacatacgatccttcgtcattgtcttggagtattgaagacccgactgtctgcaaaattgaaaacggaatattgaccggaataaaaaacggaacgacgaacattaccggcagcataggcaacttctccgggaacatgaaggtaaccgtcgaaataccagaatcccccaaaatcccggccgacgatttttatggctggactacaaaatccatcagctccatcaccgatgccgccgttactccttcggggaacaatcaggccatattgggattcacttacaaaaccggacgactcccatacgtagaaatggacaaagcgattaccctttacagtattcccgataccttgcgcatgctaatcaatagcgagatacccgtgtcgaaaatacaaatagcctgcaaagccaatggcgacaaagagcagtatctcgaatacgaaggaataacagtcaatgaagattatctcatcagcattcctctatccgacatcaccggagaaaacaacagaggaggatttcccgtctctctgaattatatcaaattctatatcaacacgaccggaacgaatagcggacaagcctataagatacatatcaaagagttctctctggtctataacggcatagaaagcggaatagacgagacggtggccggtaacaaaaacatggtcgtctacccgaatccgataacgggcaataccctcttcttacagggagagaacatcgttcccggttcgtcgatacgcatatacgaccgagtgggggcattgatactggaacaactactcgacgaaacaggaatcgtaaacatcggcgaccaacagccgggtgtatacatcgtgaacgtgcaaaatgagctagggacccatgtatgcaaaatcgttattcaataacttaattcattataatccatgagagtaaatttaaccataatcctgctagcatgtatcgcatcgctatcgggacagaatgtaaaagttaccaaacattacgagataaccccttcggtcggacaatcggccttctatccgatacttagtcccgacgggaatcgaatcgtatatacctctgaaaatttttccggcttaaaatcatacgattttgcatcagggaaaacccagattatcactactgccgagggagccgggttcgacccgattttcagcaccgacggttcaacggtgtattatcggccgcaaagcatcataaacggacgtgttcaccgatctttgaaagaatataacttgatcgagaaagccgaaaaacaacttatcgccccaacccgcgatttgaaacgtccggtcgccatctcaggcggtatggaagtagtggccgacaataaacttatgaaaagtacaggctctcaaataagcgggaactatgtctattccatcatcaaagagggaaaaataatcgtgtgcgacggtaaaagcacccgcatattacgtccttacggcgacaaagtggaaagttatttgtggacagccgtatcgcccgacggatccaaaatcgtgacttatgccataggcgtaggaaccgttgtactcgatatgcagggtaacatacttgccgaactgggcgactacgaatcccctacgtggtatggcaacgatttcgttgcagccatgaaagcgaccgacgacggtcaccaatttacttcgtcgaaaatcgtattgttagactgcaacagtaaacaggtacatgatttaacatctccgtccgaaatgggtatgaatccgtcggcctcggccgaagcaggcagaatagtgtacagcacggtcgaaggaaaactttttatgttggaattgaatgtaacgaaataacctcatcgccatgaaaaaatattatatcattatcattgccttcttgggctgtttaggcttgcaagccaaagatatgaccggacttaaaatttacatcaatccgggtcacggcggttatgactcggacgaccgcaatgtagccgtatatccgtatgcacaaggcgacacactcggtttttgggaatcctcgtcgaatctgcacaaaggattgatgttaagagaactgctacaagagcagggagctaccgtagcgatgtctcgcgtattaaatcggacggaagacgaccgaggactcgaaaccatcgggcgggaagccagcgaatgggaggccgatctgtttttctccatacacagcaatgcgaccggcacgagccgccgggataatttcccgatgatgttgttcagaggatataccgaaaatccggtaaagcccgaggacaaggtagcggcaaagatactgttcaagcaccttatcgaaaaccaagtaacctattggactcaaacggaagagtatgtcgtgggcgattttgacttctatcccgactggaacaatgcaggattgggagtcctccgaaaattaaccgtcaccgggtttctttcagaaggttcttatcacgactatgtgcccgaaacatatcgtttgctcaacatggactacaaatggatggaagcatggcatttcaccaaagctgtcatggaatacttcgacacagaaggattcacaacgggaaatatcgccggtgttatttatgatagtcgcatgacccgtaccgaatcgtacgtacaacacggaagagacaagcaagtgccattatgtggagccacagtaaccctgttgccgaacaatataacctatacgacggataacctatacaacggcgtatacatgtttaaaaacctcgctccgggtaattaccagctaaaaatcgcagcggaagaccattacgatcggacaatcgatgtaacagtgacagccaatacaataagctataccaatgtggctatggacagagtgagaaatacagcaccggaagtcacctcttacagccctgtcatggaaaacgaaactgacagcatcaactgtacgactcccattgtcttgaatttcaattgggatatggacacggaatctgtacaaaaggctttctcgatcgaccctcccgtagaagggaacattacattcgaagattcacagtaccgaatggtatttacccccactcgtccttacgaggtagctaccctatataccgtaaaactcgataaaagtgcaaaacacccgggtaatatgtctatggccgaagatttttccttcacgttcttaacgcagggaagaaaccaattgaaactattggcagccagcccctcggaaggagcggtactacactatccgaaaccgacgatcgaagtaagattcgataatgttctcgaccctgtcaatattcgagacctcatcaaattacaggatagtgaaggaaacgatgtcagcatcaacttgcgttctgccaaatacaaccagttaggagactcctacgggaactattattttaccacagctgccgatttgaaacaaggacaaaattataaattgaaaatagatgcctcgttgcacgatgtggaaaatatagcgatcgtagaccccatcgaaatcaattttaccgccggagatgtaagccgctccgaaacagccgtcgaggaattcgaaactcccgacatgattacattcgatgcaacccaaagtatcgggacaaccactgcaaaagcgattcgctctaccgctcaaaaactgttcggtagcgcatcttacaatttcacatacacattcaatgcagacgaagctcacgttgtattcacgacagacgatacattcggaagttccactgtggtcgacaatacccaaactatcggtatgcacatttacggcgatctttcttgcgacgaaatatggctgcaactatcctctggaaacgatacacaagagattttattgacgaatgtcgatttcagaggctggcaattccgggaaacccgtttggaccagctgaatccgggaaaggactatcgcataagcggtataaagataacgagaacaaaaccgttcttctccgaatcgggtagtttcttcttagacaatatgctggtatatacctcctcggacattcactttatcgctacatcgaaagccataaatgtttatccgaatccggcttccgatatactaaaaattcagtctgacacctccgtacaacggtggaccctgtacagcctatcgggaagctgtatcgctaccggttcagaaacaacgatagatacctcgaacattccctcgggaacgtacttgttgaaaatacagaccgaaggaaaagagttctgttatccggttttgattgtacattgacaaaggattaagaatatacgggcgataaagtataaacgatctgctttgtactttaccgtccgtatttttatcgtactatttttaacagaattttgatactttacagtaaaataagtattctatttggaaaatgaagaaagatattttatctttgcataagatgcagaaataggttgtgcctcagtaaaatcgatgctaacattgtttctactttcgaacggcactattctcataaaagataaacgacactcgccgatacgaaaattaattttcattacggccgtctgttttatctttataaagagttgaatgatgccagaaagcacatctatcaagattttttatttatgaaagttatagcagaaagtggttccacgacaacagaatgggttctcgtcgatggaaaaaatgttttggaaagaagttttacggaaggaataaatccctttttccaaacgagaagggaaataagccacagtatccgtctcaatttaccggaaactttttttaagaaacgatgggaacgggtctatttttatggcgccggatgtgccaatctggataagaaaaacattctcgaagcctcgttagtagcacaattcaaaacacccatttcggcggaaagcgatttattggctgccgccagaggtttgctaatcgacaaaccgggaatagcctgtatcttggggaccggttcgaattcttgtctatacgacggagaacgtatcattaaaaacgtacgttccgccggatatatcttaggagacgaaggcagtggggctgctatgggacgacgttttttaagtgactacttaaagaaccttactccaaaggatctctgcgatgcttttcatgaaaaattcaaagttactccggacgagattatggactccatatataaccaccctttccccaaccgttcgctttctactttctcctatttcttgaaagaccatctggacaacaaatatgctttcaatttagtctatgaagaattgatgagattcttccagagaaacattatccaatatgactataaatcatatccggtttatttcatgggtaatttggcctatacctacgccgatattctcgatttggtagctaaggatttcggattgaatatagaaaaaacagaaaaaagccctatgcagggactcatcgaatatcactcgatctacgggtaaagatatctcattatttcgatttatactcatatgcaggatcgtatcgacagattctgcatatttttttcttgtaaaaaagagagatgaattcatattaaaaaatactaaatatatgttctcgaatcaaaaacatatattatatttgtatgaaccataatagaaaggtatctactcatgaacttttagcacctaaaataacgctgtaaaaagttctaacaaagagaaatagattgacaaaaaaacaggaaccgaagtttatccattcgaaaaacatgaaagagaaccgatatattttatcatttataattttcttattaggctcactatcaatccattcacaaacgcatagcgacctaagaacgactgtcgaagaagcacttgtttctctaaaacccgaacacttagccatcggtgaaataaaattagatacgcttcttttagaaaaggggaacaaacttgtcgttcaaatgaacgatgaattttcttatcttccattcagaaaggagctcgttaaacgagcctatgacaccatacgttctattttacccccggacctgaaaaagaaaaaacttttcattctcaccgatggatatgaaataagcgaattgattcctttcgccgacaatcgcaaaagattcgaaattcattgcgagcggccgatcgtcagcccgataaaatgtcactaccttcctacaaaaggtttactcaacagacatatcgctctatggcaaagtcatggatactatttcgaacaatccttgaaccgatgggaatggcaacgtgcccgaattttcgaaaccgtggaggatctgtacactcaaagtttcgtcatgccgttcctaacccccatgcttcaaaatgcaggagcctatgtattttctcctcgtgaacgagatacgaaccggcacgaactcattgcagacaacgacaatgccgatacttatttcgaaacaggaaccgaaaaggtaaaatgggagaacggcggcacaggattcgcccatacagtctcggtctataccggcactcgaaacccgttcgacgacggaagtttcagacaaacaaaaaccacaaccgatcctcggaaagagatacaggcccattggtatgctccgataccccaaaccgggaaatatgcagtttatatcgcctaccgcacagtcaaaaacagcaccgacgacgctttatacaccgtatatcacaaaggcggaaaaacacagttcaaagtcaatcaaagtatgggcggcggcacatggatatatttaggacatttcgatttcgccaaaggtgaaaacgcccatgtagaactcagcaatctttcccgaaaaaatggaaaaacagtcacggccgatgcggtgaaaataggaggcggatatggcaatatcgcccgacgagtagacaattcgcacatcgacgagaatccgggaaattcatctataaactattcctatgcgacaagcggttatccccgtttcaccgaagccgcccgctattggctacaatgggcgggattccccgaaaaagtctattcccccagtcaagggaaaaacgactataccgacgattacaaatgccggggagaatgggtcaattatctggcaggaggttcggacatactgcccgacagttcaggattgaacgttcccttagacctcgctttcgctttccattccgatgcgggcacaaccaaaaacgactcgataatcgggagcttaggaatttattttaccggaaaagggagaaagacctatgggaaaaatactcccagacaagtttctcgttatctcaccgatgtcgtattgacacaaatcgccgatgacatacgagagacttatgaaccggagtggaaccgccggggcatgtggaacaaatcctatttcgaagcccgtgtacccgaaatccccaccatgctcctcgaattgctgtctcaccaaaatttcgccgacatgcgttacgggctcgacccacgattcagatttttggtttccagagccatatacaagggtattctaaaatttatcgccaaacaaaacgactatgaatatcaggtacaacccctgccggtaaatcatctgagaacggagttcatcgggacgcacgaaataaaactgacatggcgtgccgtcgaagatccgttggaaccgacagccactcccgaaaaatatatcgtctacacccgaatcggaaacggagcgttcgacagtggcacactcgtatcggacacttcatacacgaaaggtataatacccgattcgatttatagcttcaaagtcacagccgtaaattcgggaggagaaagtttcccttccgaaacggtgtcgctttgtcgctgctcgcaagaaaaaggcacggtcatggttattaacggcttcgaccggataagtgcacccgacagcttcgaaatagacaccctcatggcaggcttcgacacacgcaaggacttcggagtgccttacctctacgacatcagtttcatcggcgaacaatatgagtttcgacgaaatatcccgtggatagacgatgatgctcccggatttggagccagtcgtgccgactacgaaacccgcgtcatcgccgggaacacattcgactatccatatatacacggccgagccataacgaatgccggatattctttcctatcggcaagcgacgaagctgtgaccgaccaactcgtcgccttgaacgattatcgtatcgtcgacctcattctcgggaaagaaaaacaagtgaaaataggcagaggcgtcaccgacagagcatttaaaacattccccgaatccctgcaaacgatcattgccgactattgtgaaaacggaggaaacatcttcgtctcaggagcctacgtcgctaccgatttatgggacaacggagatgtgaatgaaaccgacaaacgatttgccaatgaaatcttgcactatacttggagaacaggacaagcctcggtcagcggacaggtgaaacccgcagcttcgccgttccctgcattcgacacgctccatgtcgaataccacaatacgctcaacgaaaattgttatgcggtagaatcgcccgacgggatagaacctttcggaaaaggaagttataccatacaacgatacggggaaaacaacatcggcgccggaatcttctatcggggacagcgttataacacatgcattttaggatacccgttcgaaaccatcaaaacggaaaaacaaaggaatgagctgatgaatgccattctatcatctttcgaccaaacaataacccatcaataagttatgaaaagaatttatctttctctctcgcttttattgcttgtcattatcggtagtagagccgccaatttcaaattcgcatttctcaccgatatacacattaccgccggagattctatcccttacaacgatttagcccggtcggtaaaccaaatcaacgatactccgggcattgaatttgtcattgtatcgggcgacatcaccaatataggagatcgcaaatcgatggaagtggtcaaatcgctactcgaccgactgaatgtcgaataccatatcattcccggtaatcatgaaacgaaatggagtgaatcgggagtaaccgatttcgcaagggtattcggaagcgaaagattcaaattcgaacatgacggtatcttattcatgggagtaaattcaggccccatcatacgaatggccgatggtcacgtggcgcctcaggacatcgactggatcaaaacggaattggacaaagccggtaaagaaaagcccgtaatctttatcactcactaccccctacaaccgggcgatgtagataactggtacgacgttaccgatgccatacgcccctacaatatccgactcgtcatgggcggacattaccacaaatatatgcaactggaatacgatggtatccccggtattctgtgccggtcgaacctacgagccaaagagaaaacaggcggatactctctgtgtgaagtcacccctgattctattttcatttacgagcataaaataggtaatgttcctacccgtaaaggagcatactccatgaccggaatgaattatcccaaaagcaatgccggttatcctcgtcctgattactcggttaacaaagagttcccgcaagtttcggagcaatggctcgtcagaagcggatatgaaatattctcctcacctgcctattgggataaaaaagtttacgtaggcgatgactccggggccgtttcctgttattcggccaccgacggccgaaaactgtggagtttcaaatcggatatgcgtatcatagggacacctgccgccgataaaaacgtcgtcgtattcggctctgccgacatgaatatatacggtctgaatgcatccgacggccgactgttgtggaaaataaacaccgaagcacccgtattgggagccgttaccatacgaaacggaatagcctacatcggaggcagcgaccacaaatttcgcgcaatcgacatcaaatcgggaactgtcgtttggagttacgacggcgtagaaggctacatagaaaccaaacccctcgtttacgacaatctcgtgatattcggagcatgggataaaaacctctatgccctcgataagaaaacaggaaaagaagtttggaaatggcacgaagggaaaccgggtagattctattcggcagcggccgtttggcccgtggcggcaaatggaaaagtatttatcgccgaccccgaaagagcattgacagctatcgatgcttctaccggaaaaaccgtatggagaaccaaagaatcgatggtacgtgagaccgtcggcctgtcggaagacaaacggagaatttacagtaaaaccatgaacgacagtgtcgtatgttactctgccactaccgacttccctgaaaaaatatgggcttcgaatgtcggattcggatatgagcacgccccgtccatgccggttgaaaaagagggtgttgttttcggcagtaccaaaaacggattgatgttcgggttggatgcccacacaggcaaagtactctggaaacacaaagtgggtaattcgctcatcagtacactcgtaccgctctctaaaaacaaatgtctgtttactgccaccggcggtgaaataggattgttggtaatcgattataaaataaacaaacacaaataattttccctatgaaaacaataaactgtttcatacctttttctggtaaagttcaagttaccgaaaccatcaaaggattacgcaactgcgaatatgtgaagaacatatatttgctatcttcggaaaaaagcaaagaacaaatagaaggttgtgaaatattggacattccgtcgcttaacgcctcgaccactatgaaacttttggcagcgtacagcgatgccgatttcacattgctttatacgaaacacaccacattagagttaggatacttcgcactcgaacgtatggttcacatcgccgaagacagccaagccggtatggtatatgccgattcctaccatgtaatcgacggagaacagaagaaagccccggtcatcgactatcagttcggcagtttgcgagacgattttaatttcggttccctgctgttattcaacgccgaagcactcaaagatgcagttgcccgcatgaaaaccgatttccaatttgccggattatacgacctccgtctgaaattatctcaaaaaacatcgttagtacacattaacgaatatctctactccgaagtcgaaaacgatacccgaaaaagcggagagaaaatattcgattatgtaaatcccaaaaaccggggcgtacaaatagaaatggaagccgcatgtactgaacacttgaaagaaataggcggttatctcgaaccggtattcgaaaagatcgaattcaacgccgacaatttcgaatacgaggcttcggtaatcattcccgtacggaaccgtgtacgcaccattgccgatgccatcgactcggtcttgaaacaaaaaacgaacttcaaattcaatctgattattatcgacaaccactcgaccgatggaacctcggaggctatcgatcgctttgccggcgacgaaagagtaatccatcttattcccgaacgaaatgacttaggtataggcggttgctggaacatgggcgtacatcattccaaatgcgggaaatttgccgtacaattagacagcgacgatgtatacaacaacgaaaataccctgcaaaccatgatcgatgcattctatgcccaaaactgcggtatggtcgtaggaacttacatgatgaccgatttcaatatgaacatgattgctccgggtatcatcgaccacaaagagtggactcccgagaacggacggaacaatgcactccgcattaacggattaggcgcacccagagccttctacacgccactgctccgtcaagtgaaggttcccaatacgagttatggcgaagactatgccctcggtttgaacatctcgcgccattaccaaatagggcgcgtttacgaagtagtttatttgtgtcgccgttgggacgacaactccgacgcttcactgagtatcgaaaagatgaacgccaacaatttatataaagatcgtattcgtacatgggaattacaagcccgcatcgccatgaacaaaaaataatgcaaatgaaagttacatcggaacaagccaaacaattactgaccgaccaactctccgtatgggaatcggcgcgtgacaattacaaagcattggaagcggtacaggttaaagaactaacggtagaaggttgtacggtcaagatacaattcaacccggcccgtatcgtatcttcggcagccaaagtggatactcaatcgctgaaagagcgcaaatgttttttgtgtgccgaaaaccgtccggaagtgcaagaaggattacccgatggcagctatacatggttgattaatcctttccctatattcccggaacactttaccattccggtaaacgagcacctaccgcaacttatcgaaaagagatttggagacatgcttcgtttggcacatgctgccgaacattacgtactgttctacaacggccccaaatgcggagcatcggccccagaccatgctcatttccaagccggtaacaaaggatttctacctctcgaaaaggagttgaaaaagtataggcgcattcccatacgaaccgaaaaatcggctcgtctaagtcaagtcgaggattatatctgtcccttcttccttatcgaagcggaatcggaagaaaccgccgaaaagctctttgtgaagctctataacgcactcgaactaaaagagggcgaaccggaacccatgatgaacatactcacatggtatgaagatggtaaatggagctcttgtattttcccgagagcccagcatcgaccgtcgtgttatttcgccgaaggcgacgaaaatatcttgctcagccccgcctcggtcgatatgggaggtgtgttcatcacccctctcgaaaaagattttaggaaaatcgacgctgaacatctcgaaaaaatactttcagaagtctgcctcgaccgggaaaagatgtacgaaataatagaaaaacttaaataaatattcatgaaagagccacaagttaccgtaggaatcatgtcagaacgacaaatacgtttcgtcttcaacgggacgtatctggcaaatggcgttccagtctcaggagagcatgaggctcatacggacgggaaacagatcttctggaacggaaaccgctatacccgaatcgttttcactcccgaaaaagaagactattcgttttgtctcaaagaggtgactatcggagtaaaatttcattgggaaaggaaagaagaccaaactttcaaaggtaatctgaacctgatagtggaaaacggacttatcacagctataaacgctttgagcgtagaagactatctacttagtgtcatatcttccgaaatgagtgcgaccgcctcgctcgaactattgaaatcgcacgccgtcatttctcggagttggttgttggcccaaatacgaaaaaacaaagagttagccggaaagaaacccgactcgttgattcgtaccgacaaagaactgattcactggtatgaccgggaagaccatatcaacttcgacgtatgtgccgacgatcattgtcaacgctatcaaggcatcactcgggcctgtaccgaagttgtcgcacaagccatacaagctacgcacggagaagttctcacatacgatgacgaaatatgcgatgcccgcttttcaaaatgctgcggaggcgtcgtggaagaattttcctcttgctgggaaaacataaatcccccctacctgacggctctacgggacgacaaaaatgaaaaagattttcccgacttgaagaacgaagacaccgcccggcaatggatatacacctcccccacagccttctgtaatacgaccgacaaaaagatactctcgcaggttctcaacaattacgatcaggaaacgaccgatttctatcgatggtccgttgtttactcccaaagcgagctggctcacctcattcatgaaaaatccggaatcgatttcggtgaaatcatcgacctaaaacccatagaacgaggaacgtcgggcagattggtacggttacagatacaaggtagcaaacaaacccttattatcgggaaagagctggaaattcgccgtgtactatctccgtctcatttatacagctcggccttcgtcgtagagcgagaagatatacagaacggaataccccaacggttcgtcatacacggagccggctggggacatggcgtaggactctgccagatcggagccgccgtcatgggcgaacaaggctatccttatcgcgaaatactgctacactatttcgtaggtgcgaacatagaaaaactatattaaaatacacaccatgaaccctcaaaagaaaacatcaccctgggcgtggatccctactctttactttgcacagggattaccctatgtagccgttatgaccatatcggtcatcatgtataaaagattaggcatatcgaacaccgacatagcgttatataccagttggctttatctgccgtgggtaatcaaaccgttttggagtccattcatcgatttactgaaaaccaaacgatggtgggtagtcactatgcagatgttggtaggcgccggactggcaggtatcgcattcaccattcctgccccgcatttctttcaaataacactcgccattttctggttggtcgcattcagttctgccacccacgacatagcagccgacggattttatatgttggctctcgatacccacgaccaagcgatgtacgtgggtatccgcagcaccttttacagagtcgcgaccatagccggacaaggtctgctggtgattctcgccggattgctcgaatcgaatacaggcctcactccgttgaacctcgaaataaaggccggtccggaatatgccaacgaaatagttcttccctccaccgactacatcatcgacgcaaacaatgaagaaatgcacttcgtcgcatcaccctccaccctcgaaataggaacaacggccgatccccatgcagtagactctatcaacgcatgggtaaaatgccaaaacattgcgaacggatttgtcctcgcagaggcgaaaaacccatcgcaaacaaaagatgaaaacagtagcggaataggcgaaaaaataaacacctttatcaaagagacattcggtgaaaaaagagaaagaaccgaacacaagctcaccgggaatatgggcgttataaaagtttgcctctcccaaaagcccgaaaaagaagaaaaggtcgttttaaatacagtgcacaaaagcggagaccaaagtatctatctcacgcaaggcgaccgtttggaatttaccgaagagaattgggataagccggcttatatcgcggtacaaatagacccgaaattaaaagaagcatcgaatgcttcgttcgaatccacatcgggaaatatctcgctggcatggtcaatcacattctttgtcctcgccggattctttatcgctatatgcttgtatcacaagtacattttacctaaaccgaaatcagacaaagctgtatgtgaagcaaccgcctcgaacattttcaaagagttctttgccacgtttgtcacattcttccagaaaaaacaagtatgggtggctgtcctgttcatgctactataccgattgcccgaagcccagttggtaaaacttatcaacccgttcttgctcgaccccaaagaattagggggattaggactgacaacgggacaagtcggtttagtatatggtactatcgggattttaggtttgacgatcggtggaatcatcggtggaatcgtagcggcaaaaggtggactcaaaaaatggctttggcctatggcttggagtatttccctcacctgcgctacattcgtttatctcagctattaccaacccgatagcctgttcgtcatcaacctctgcgtttttatcgaacaattcggttatggatttggattcacagcttatatgctgtatttgatttacttctccgacggggaacataaaacggcccactatgccatttgcacggcattcatggccttaggtatgatgttacccggcatggctgccggctggctgcaagaactcataggatataaacacttcttctattgggtaatgatctgttgtgcagcgactattgcagtatgtgcattcataaaaatagatcccaattacgggaaaaaagagacagaagaaaaagagacagaaacaaaataatataaaaaataaagtctatgaaattaaaaaagtatataattttgtgtttgattacaagtcttacaggaggactgagcgcacaaaaaacaatgacgggtatcgaagttctgaaaaaagataatttcaaaatattagaagggaaaagagtaggcttgattaccaacccgacaggggttgataattcgttgaaatctactatcgatattctgttcgaagctcctaacgtcaatttggtggccttgtacgggcccgaacacggcgtgcgcggcgacgtgcatgccggcgataaggtagaaaattccacagacccatcgaccggattaccggtatattcgctatatgggaaaaccagaaaaccgacacccgaaatgttacaaggtattgatgtgcttgtctacgacatacaagatataggttgtcgctcctttacttacatcagtactatgggcgtggctatggaagcggccgctgaaaacggaatcgaatttatcgtactcgaccgacccaaccccatcggaggagagaaagtggaagggaatctcgtggaagacggttacatctctttcgtaagccaattcaaaataccatacatttacggacttacttgcggagagcttgcccgaatgttggtgggagaacacatgcttgccaaagactgcaaacttacagtcgtccccatgaagcattggaaacgaagcatggactatactaaaacaggtttgcaatggataccctcctcaccacatattccgcatccccattcggcatacttctaccccctgtcgggaatcgtgggagagctgccctacctctccatcggagtgggatataccataccgttccaaatgttcgcagcagaatggatagatgccgataagctcgccgaccgcatgaataatttgaacctgccgggtattaaattccgccccatgcatttgaagcctttctacgctttcggaaaaggggaacatttacaaggagtacaagtacatattttggattataaaaaagctcgactttccgaagttcaattctacatcatgcaagaattggccgccttgtatcccgataaacccgcattttgcaaagaaaatgaaagccgattcgacatgttcgacaaggtatgcggaagtaaccaaataagagaaagattttcaaaaaattaccatttcgacgacatcaaggactattggtataaagacgtcgaagatttcaaaaaactatctcgaaaatattatctctataaataaagaacaaattgtttaacgtaccgagatgaaagaacaaaagtataacgcttatctgaaagaaatcgggaaatttatcccgaaagaccggatatataccgatgaacttcgtttgttggcttggggaaccgatgccggattctatcgactaatcccgaaaatagtcattcgggcaaaagacgaaaatgaagtttcccggctcctcgctttggccgacaaatatacactgcctgtcacatttcgagcggcaggaacttcactctcaggtcaaagcataagcgattctatacttatcgtagccgggaaaaattgggaaaaatattccatctcggaagatttcgaacgcattacactccaacccggtattatcggggcacgtgtcaatgaaatattaaaaccccacggtcgtaaattcgcacccgatcctgcatcggtaaaatcggctatggtgggcggaatcgtcatgaacaatgcatccggtatgaactgcggtacacacgccaacagcgacaaagaattgctttcggcgaaaatcgtgcttgccgacggtactcggttgaacaccggcgacccggaaagtcgaacgacattcgaaagaaaacacaccccgttcttgaacaaaatcatcgagataagagacgaaatacgaaacgacaacgaactgagtgaccgtatccgcaaaaaatattccatcaaaaatgtcaccgggttgaatttattaccttttgtgatatatgacgacccattcgatattatcgcccacctcatggtggggtcagagggtacgctcgctttcttatcggaagttacgatgaaaaccgagcatgactatccctattcggcgagtgccatgctttacttttcgaacataaaggatgcctgtcgagcggtcgttgccatgaaacccggtcccgtattcagtgcagagctgctcgacaaaaagtctttggcttcggtcaacgacacgaccggaacgggtcttacagcagttttgaccgaaacgaaggccgatactcccgaagaactacaagccaatatcgaagaaataaaaaagatactttctccattcgaaaccgttactcctattcactttacggacaaacccgaagaatattcgaaatactgggctatccgttcgggtattttcccatcggtaggaggaactcgccggccgggtacgaccgttttgatcgaagacgtagcgtttccattgaaagagctgccagaagcgaccgccgatttacaagagttattggtaacgaatgaatatcacgacgcttgtatttacggacatgcgttagagggaaacttccactttatcatcagccagtcgttcgactctcccgaacaagtcgcccgatatgaaaaactgatggacgaagtaaaaacattggtggtggacaagtacgacggttcgctgaaagcagaacacggaaccggacggaatatggctccattcgtcaaatacgaatggggagaaagggcctatggattcatgaaagccgtcaaagagttgttcgatccgaaaggattactcaatcccggtgtcattttcaacgaagacccacattgccatttaaaacacttcaaacctatgcctctgacaaacgctcacgtagacaagtgcatagagtgcggattctgtgaagtgaattgcctgacttgtggattctctctttcttcccgtcaacgtatcgtcattcaacgggaaatttcccggctcaaaaaactatccgatacggaaagttcggaacggctgaaaacattgcagaaacaatacaaatatttaggaaacgcaacctgtgcgggagacggactttgttccatgtcttgcccgatgggaatcaatgtaggcgatttaacgcacgatatcagacaagcgaatttacccgaaaaaagcattggatacaaaaccggcgatttcgtcgccaatcattttgccgaaacgaaatcggctctcagacctgttctttacttggcgaacatggcccacaatatgttgggcgacaaagtcatgagctctattgggcaaggtcttcaccaaataggtgttccattgtggacaccatctatgcccaaaccctattatcctcatcgaatacaacagcacgaagaatctctgaaagtggtctatttcccaagctgtatcaatcaaactatgggtacggcgaaagattcacccgaccaaacgcctctgatcgacaagactgtcgccttgctgcaaaaagccggatatgaagtcatctttcccgaaaacatgaagaatctctgttgcggaacaatctgggaaagcaaaggtatgatggacattgccgaccgaaaatcggccgaattggaagctgcgctatacaaagccagcaacggaggaaaatatcctgtactctgcgaccaaagtccctgtctgcaccgtatgcgcgaggtcatgacccaagtaaaactatatgaaccggtagagttcatatatactttcctgaaagacaaactcgttttttctcctatcgacgaaccaatcgccgttcatatcacttgctcgatgagaaaaatgaatttgggaaacatgctcgtcgatttggctcgtttatgttctacaaaagtaattgttcccgaggaagtaggttgctgcgggttcgccggtgacaggggattcacttatcccgaggtcaacgcctatgctctcagaaagctaaaacctcaaatagaaaaagcaggagtaaaaaccggttattccaatagccgcacttgcgaaataggactgacgaccaatgcaggaataccttatatttctatcgtttatttagtggataaatgtacaacttcaaaaaataaatgccatgaacaacccgcctaataaaaggcttctttctctcgatatactgagaggtatcaccatcgccggaatgattatggtaaataatcccggttcgtggggacatatctatgcaccgctcggccatgccgaatggataggtctgactcccaccgacctcgtttttccgttcttcatgttcatcatgggaatatcgacttatatgtcgttgagaaaattcgacttccgactatcgggagcggtagcgtggaaaatcatacgccgcacgattgttatcttcgctatcggattggctatcgcttggttcggattaaccatgcgtacctatcatcaactggggggagagtctctatcctttttcgaacgattgggccgctctatgtggaatttcgaccatatccgaattttgggagtcatgccccgtttagcgatttgctacggagcagccgcatttatcgccttgattgtcaaacataaatatataccccacatcgtatcggtcacgttgattgcctatttcgtcatactgataacaggaaaagggttcgaattttccgaagataacatcatctcggtagtcgacagagctattttaggaagcaaccacatgtatcacgataacgggctcgctctcgaccccgaggggttgctcagtacgataccgtcgatatgccacgtacttgtcggcatattttgcggaggactcatcatgcgtacaaaagataacgccgtacgcatgcagaatcttttcattgcaggaacgatactcacttttgccggattacttctcgaatacggttgtcctatcagcaaaaaaatatggtctcctacatttgttctcaccacatgcggattagcagccagctcattggctttgctcatctggatcatagacatcaaaggatacaaaaaatggagtcgatttttcgaagcattcggtatcaatcccttattcatgtacgtattgggagctgtgttaagcatcctcatcggtagtatttacgttacttacggaggagcgagtatgactttgaaaggaatgatttacaacgaatggctcgttcctctattcaaagacgaaacttttgcatcgcttatattcgctcttttatttatcggtgtaaactggattatagggtatgttttgtataaaaagaaaatatatataaagatatgattattattgcagacagtggttctaccaaaaccgattggtgcgtagtaaaccacggaaaacaggttaaaagaatcacaacggagggaaccaatccgttttttcagacagaagaggaaataagccaagtggtaaaagataaactcatgccccatttggacggagtgaaaatagatgccgtttatttctatggggcaggttgtgcctttccagaaaagaatgagattgtccacaatgccatttataggcacataccggtaactatcgaagtcgggagcgacttgttagcagctgcccgcagcctttgtggacataaagcgggtatcgcctgtatcatggggaccggatcgaactcttgttattacgatggcaaagagatcgtaaacaacatatccccattgggatatatcttgggcgacgaaggcagcggcgctgttttgggaaaattattggtcggcgactgtttgaaaaaccaactgactcccgaactaaaagaaaaatttttcaaccgcttcaatctcacgccaaaagaaattttggataacgtatacaagaagcctttccccaatcgttttttggcatcggtatcgccgttcctcatcgaaaatatcgaagagccttgtatccacagaatcgttctgaacggattcaaaaacttcttcacccgtaatgtcatgcaatatgactacaaaaatgtaaaagtacatttcatcgggtctatcgcatactattacaaagaagttttggaagaagccgcccttgccctgcaaatagaattgggaacaatcataaaaagtcctatggaaggactcgtcgaatttcattcaactttataaaaacgcatattatggcattcgtaaaaataaccgaacaaccgtctctttacgacaacctcgaaaaaaaatcggtattggaaatattgcaagatatcaataccgaagaccagaaagtcgctttggccgtgaaaaaagcgattcctcaaatagaaaaattggtatctcaaatcgttccccgcatgaaacaaggcggacgcattttctatatgggagccggaaccagcggacgtctcggagtactcgacgcttcggaaattcccccgacattcggtatgcccccgacattggtcatcggactaatcgccggcggcgatacagctttacgtaatccggtcgaaaacgccgaagacgacatgaaccgcggctgggaagaactgaaagagcataacatcaacgaaaaagacacggtgataggaatcgcggcatcgggtacaaccccttatgttatcggagctctacatgcggcaagagagcacggtattctcaccgggtccatatcgagtaatcccgattcccccatatcgaaagaggccgacgtggcgatcgaaatgattgtcggacctgaatacgttacggggagttcccgcatgaaatcgggaaccgggcaaaaaatgattctcaacatgataacaacatctgtcatgatacaattgggacgggtcaaaggtaaccgtatggtaaatatgcagctctccaaccaaaaactagtagacaggggcactcgtatggtgtcggaagaactgggcatggactatgaccaagccaaacgattattgcttctgcacggttctgtgaaaaaagcagtcgatgcctaccacgcagaaaattcaaactcataaacacatcgaatttatgaaaccgttttttatccttttagggctatcgatatgcgtaatgagcctgtcggcacaagaagcataccaatataatcagttttattaccaacgctccacattattcgagaagttacctatcgacagcgacgatatcgtatttttaggaaacagtatcacgaacggttgcgaatggcacgagttattcaataaccccaatatcaaaaacagaggaataagttcggacgtttcaatgggggtttacgatcgtctcgacccgattatcaaagggaaaccggcaaaaatattcctgatgatcggtatcaacgacatcgcacatcatttatcaaccgacagcatcgttaagaacataacccaaatcattcgaaagattaagaaagaaaccccttccacacaactttacatacaaagtttgttacccacgaacgactctttcgaacgattcaaaacaattgtgggaaaaacgccccaaattattgaaataaaccagcaattagaagagcttgccccgatagagaaatatacatacatcgatctgtttccacatctgacgactccgggaacgaccgtactcgatccccaatatacgaatgacggactgcatctgctcggagatggttatctagtctggaaagacgttttattaccttatttgcaataacaaaaatccggcagaagtcttttcttgatttttctgccggatttcattttttatttttttccaactaccttaatctctatccttcgaccataatcgtcaacacttccattccctcaaatggagaaacacagaggttattttgaatatactaaccgatagtaatatcgggacaaagtcagtttcaacatcggctacgggataactctgcattcaataaaaaatttacagagctattcgataaaccaagacataatatattgtttttttgaatataaattcaaaaaaatctcttgattaacatgattaaaacatgtagctttgtaactaaatttattaaacaaatttaatttaccatgaaaaagattgtaatacctcttcttttgggtctctttgccataataccacatcatcttccggcagcctcttacaagagcattatcgtcaaccaatcagatggctccgaaatgaaagtaaccatcgaagacgatatgaaaacagcggttgccgaagggaatctagtaatctcttgcaccaaaggcgacatagtcctgcctgtcatcgacataaaaaactggacattctctacaagtgcaggcagcgacgacgtgtggaccggaatagaatcgccgaccgcaagcggaacaaattgcatactcaattccgacagaatcattctcagtaacttacccgagggatccaccgtctctctttgttccatcgacggacgaatagttaaaagtagtcgtgccgagggcgattacgagctctctatttccgaactgcccaaaggcatatatgtattgacttataataaaaacacacttaaaatagcggttgcaaaatgaaaaaaattctacttctcaccgcagccgttctcataagcggttctgcaatggctcaacacgaacatttccatgtgttccgtaacgataaacaattcaatacgttcaacaacgtacaagaaataacctatcaaggatcaccctcctcgggttacgacaaaatgcaagtaaccgatgccaaaggtaatacgaccactatcgatatagaggctatcgacagtgttgtagtccgttccacagggattcccgaatttcacgtgaatctaaccgatcaccccgattggacggaacttaccggcagcaagagtgacgaacatccggccatactgcgcatggacgggaacggaatgtacgacgacctgcccgaacaagaagttatatttcgcggtcgaggtaactccacgtggaatatgaaaaagaaaccctatcgtttcaaaatggataagaaaacagcggtctgcggcatgaagaaagcaaaatcattcgcgttgatagccaactacatcgactgctctcttatgcgcaataccgtagctctttggcttgccaattacctcgaaatgccttttgcgaaccattgtgtaccggtaaaagtttatttcaacggcatctgcaaaggccagtatatgctcaccgaaaaaacaggaatcggcagtggcagcgtcgatatcgacgaagaaaaaggaatgttattcgaaatagactcgaactacgacgaagattacaaattcgcttacgatctctattctcataccgcagttcaaaacgggtataacaatacccgaaccctacccgtaatgatttccgacccggatctgaccgaaatagctcctgccctcggactctcggccgatgaatatttcgatacatggaagaacgatttctcagccatgctcaccgctgtaatgacaactccctcgacaggtagtttaaaagaatatatcgacattgaatcggtcgttaatttcttcatggtcaattctctatcttccaatcatgaaatgaggcatcccaagagtttcaaactttataaagattcactcgatggagtctacaaattcggcccggtatgggacttcgactgggcatttacattcgacggaagagaaggtgctcctgccaatactcctatggtcgacaataacggagactgtggtggctacacttttatcaaagccttgctgagcaatgaagagatacgcacgctatatcaacaaaagtggaatgcttttgtcaaagacggttatcccgaattgaaagcctatatggaagaatacgctaccctcatagaaccttcggccaaagagaacggagtgctttggcctgccgattacagcgtggattggagattaagcgaaagctctttcgacttccgagaaaacttcgataagctcaaagcgtggattcaacagcgtataaactattgtaatgaagaccccaacttcggtctataccgttgattttcgtaattacatctctaaccaagactatcattgtaacgatttaaaagttgggaaaaacttcattacgtcattcaaaataaaaaagtccggcagaaaccgattctcgatttttctgccggacttcatttcttattaacactactccacgacaattttccgattatatatctgccccgacgatttcacggaaaccaaataaattccgggggacaacccctcaacaggcaaagaagtaaccgattctttaagtttttctctcataacaatttccccttgtgaatttatgaccgagagttccgatacgctatctccgggaaaagttacggttacatattcgcgaactggattgggagcaaccgtaaaatctactctcttattaccgtcaacacccgtcgtcaccgtatatttccaagtagccgcctcggtaaatgccgaatagtttttcaaatcatcgtgagaaaaagcagcataatagtaagtcgctttttctaactcggaatccgtatagcactcgccctctccatcataaacaacctcgccgtccgtttcatcagcagcgaaccggtcattacggcggacaatagtcgtcgcctcaaaatcgggagctgggttaataagtcctgtcatagcaatatcgtcgagagccaacactccaccgctgcacggtgcactactgggaacgacgaaatccaacgagatcactcgcaaagcatcacatttcttactcgtattcggatgccaatcgaacgcttggaaagtgcgaatatctattttcgcttttttccattcggtcgaattcaacggtaacgtttcgttataccaccagtcatcggcattaccgtccaagtcgttatcttcttttacaataagacgcaatgtccggctcgacccatctcccttataccaaaactccaaataaggagaatcagaaaaatctcgtgccttttcaaaagcgagaaccgccgcatattcaccccatgccttgtcgatatcataagtcatttggagagcctttccctcataaccgtctgcctcttcaagagaccctctaccaccgctatcgcctacaccttcgaccgaagttattccattctcgaaatcgtccaccgtgatattcacaggtatctcataaaccggatttttccaagaaagcgtaattcttccatcgacaaaatttcctgtaaattcactcggtgcaggaggaggcgtagtatcccatagaaccgacaccttacctttggcataagcccttacgggagtattcactccatcgtcgatagttccataaatccaataatctcctttcggttgtaaattgcgtacattccaatcgtacgagtctattgcctgtacatcgctggataaccctgttacaatagaagttccgttaatactgtccaaagaataatacaaattgatttttgccgtaccctgaggatcgaaacaggaccatttgattttaaaactatcggtcaccgggtcgttatttccgttcggttccgtaatatataaactcggctttaaacctcccgaacgagtaaattcatacgaataaaattcattcccgtctctgtcgcgagcaatcaatttgaccttttcaccactctccgacacatcgatcgtagagaatccggcaatcttattaaacatcaaactatacggtttatccaccatgttatattgatcccggttgctcccgttcatcgcacccggacgaagatagtgcacgcccgctttatacagatgctcgaaattatgttcgtcaccaccaaagacaagaatatgcttacccgccaatgcgtgtttctccaacaacggcgctatatattccttttggctggccgaccactgcccatgataactggttgaatagacattgacatgcgcaaaaataaatatccatttcgaatcggcattcgttaattgctcgtccaaccaagtcaactgtttcgaaccagtggcaaacgaaggatcgtctttaccttcattccagttacaaccgataattttcacatcgccgtagtccatagcgaaataggactctcctctcgggtctatccgttcatcggtatcgatatatccatgagatgggacagaaaaataatcgtaataagtagtagggccgttttcatcggatttatccatcgtttcatgattaccgataacggaagtaagagtcttcgctgtaagcatggattctccgggaataaaaaatgccgagttccaagtgcgcatatcgcctttatttaccaaatcgccgatagtaatccacatatcgggatcgacacccaacataatcggagccgagttctgccaaatcttttcatcgttatcatgtacatcgctgaacgcgaccaaacggaaatcggttcctttctctggggctgttttcgctgtacaaatcgtttcataacgacgactttcgtcccccacctgataataatattctgtaaaaggttcgagtcccgtcaattcgatgacgtgcacaaatccctcgccgtccacattccaaccagtctcggctgtgaccttttgtcctaaatcgggtgttttcccataataaaccgtaccagacggattagaatccaacgtctgccaaagaatacgcaccgaatgggttgtcggggacatactgtatggttttttgaaacactcataaggcaattcgcctaccggtgcgttttcagtagaaacgccccagcgcgggtcgcccaaatcgctaccgtcatcaccggctcccacagccggagaatctttgtacagttggaagtttccattctctgcatctacaaacagaggattcttggatataatattctctttcggtgcacttccatacaaatccacgttataggagataacgttctttacaatgctttcatctccgtaggccgtaaagctcttggtatcgtctcttctttccgaaaatgccgaaatacaattttttatcgtcgaacggcctgcattatacagatatacgccacgacggtcatagcagttatagaaagtacaatggtcgatcaatacaaccggcatcaagactagttcttcgccacaatttatacggaagaaataattgctccctgtattaaaattaaggaatgtagaattagtaacggaaagagtttcgacctgcgtatgagcgctagaagcataaatcgctttgtttgtcgtactgttgtccgcccctataaatatacaatcgtcgatcgtcaacgattctattttaccggacaaagaaacatagacaaaacgattggtataattacgtaccgtacaaccggatataaccaccggagctccggtgaccgtatcatcgattcgaattgcatcagcaacttcggaggctccatcaaaaacgattccccgaatggtagccccgtcttttatcgaaagctttccttgaatgatcggagccgattccaacccctcggcagcacgtagagtaagggacttatctatcgtgacatttcctacataggtaacagcttcggacaactcgatgatatcgcctaccactgccgaagagacagcgtcggcaatagtttccgttcccgaaaccggaacaaccgccgccctcacatacagagctgacaaaaataatgataacaataaaaactttttcatttggattaaattaaggattaatagtaagtataactctcggcaagcataaacggttattgccattatccggcattcaccctcattattcgccttttacatcggcgtcaaattcgattttttgcccgcttaccaaacgatcgcattctatggttatctccatatcggtactaccggccggtatccctacccaacggctctgacccggctgtaagtctttcaagctgtactcggaacgaactccattgactgcgacgtaggcatcgtaataaatgggagccactcccgcattctttatctgtacacaagtagagtcctctttcactctcacatctgttatttcataacgatagccgcacagcatactcgcttgtttgattctattcattgtctggtacgaaggctggttattcccgatcatataagttatgtgaaaccgtttggactcaccttcgaaattccggccatgtataccgtcgggataatccaatacatgctcctgatcatatttcgtataataaccgaactcacctcctgcgggcgaagtctgatatcgtttttctcccaaaatcttccaatttttgccgttatactcgtcgtgcgtctcgtgcataaacgagtcgtcgaacacaccgaattttagatttctcaatgaagcatcggcttccaaaggagtatattccgaacttgcggcatcgatagaaacgctccacggtgtactcttgaatgtttcgctcataaacctgaaaaactcggcttgaaattctttggaggggaatgtctgtcccataattctcggcccatcgtatatatggtactcagcccataagccgaaaccggtttgaaggaatgccaaacgcggatcattgtcataccgttctgcaaacttctgataaaactctttgtggaaccgttgtaactcgggatgccgccagtcgggaaatccggtccgttttccctcactcaacgccacggtttcttcataatcgggcaactcgcggatatattgaggcacagcgctttcatatcccggataggtataccaaaatcggataatagcttgatgctttcgggatgcgacagcatcgagaatttgttcgagaggagtccagtcatacacgccttttcccttcactatatccttatattgcatatacgaatattcaaggctgatggcatcggtattccgcttggcgttatctgcccacaaaacgatacccgtcatcggttgtactcctgtaatttgcgactgcaacgatatctttacgaagccgtcgaaatccggttcttccatttcatgtttcgcttctgtatcgtgacaagaaaaaagagaaagcataataaccgggaaaaagagatgtataatttttttcatcatgatatatcgaatttaagaaaataaaagcggagcggcgggattgccgctccgcaataaaggaatgaaaaagctatgtaattataatgttgtaggagtaaatgtgaccgtaaatttcttactgtttgccggaacaatcgtgtaataattaccgtccagattttctttgtcgatagtaaatccgtctttcaaatcgacaactattttatagtaagtttcttctgtcggaacaggtaataacaaaccactatcgccagcaggagtcaccccgtcaaaatatttcgcagaaatacagtatttaccatattcctctgccgtataaggagctgcccagaacgaaacgtcaccaccccacggcaaaatggttgctattgcctgataggtattcgccgtcggcgaagtgcgatacaacgttaaacgagtcttttcattccaagagccacgttcaatacccataaatctattccaacaccagccgtccatataaattacatcgggataacccacgttattcatgacgtaaaccgtccccgagaaagcatcaagacgtatcaagtattcgcctgtcggggcaatcatcttccaagtaggattaccggccccggtaaacacgtcgtgatcacaataagccatagacaaatcgactccctcggccgttacggtttggtctttcgtcaactgagccaatccctcgtacgagaagtactctccatcgatcaacgccaacgaagagccacagaaagatatggcagaaggagctaatgctccgttaatataaataccttcgttggtataagccaatgtgcgagtaccgtcgctcaactctactttggtatattcttcaccttctttaaacactttcatcgagaaagctccgcccaaagtaatcgagaagctggcagccttgtcctctgctcccaaagtcaattgacgattggcgaatgtcaagaaattatcttttcctccctctttgaaataaaattgtccggcaacgatagcaccccacatatcggtttctacgctacccgtgccgtccgacggcggagtccatgcccaatatttgcgattaccattttgatatccctgcatcttcgttttcgaacgttctacccaaataccattgtcgggagcatcgttatcgtcccagtgtccggaaatcgtaccgaagatataaagcgattcgctgatcggcgaccaattttgagcattacccaaagtcaattcgaaactaactgcattaaacgaaattttgaaataggcttcttcctcgccaccgaatacgatattgtcttttccaagagctataatctcgtctccttccataccccacgacataccagttttattgctattggcataaatcttgcccgtagcaccggccggaataaaatcttccacggaaaatacatttccgtccttttccatcgtatagaccaaattgttatctaaggccagataaagagcatcgaatgtcggaagcgtcacacctttaatgccaacttcttctgtactcaactcattgctggaatttttcaccgtaaccgaaatagtcaaatccccggctactgcatttttaggtaacggaagagctatcttttcattcatgtcatacgtttttccggtaagcatttttgtcgtttcataaaacgccccattggcattacttaccgaaatcatatattgacgcaaacctttttcatcggcaaatttagccgtcaaagtcacctcatcgccatattttacatcggcattcggagttaccgccagttctgaaatagcagagttcccagcagtaccgccgcctccattaggttcatcatcgtctttacaagaagtaaatacaaccattgtacttaccagtaaaaacataaaatacttcattgtttttttcatcacagtaatttttttggttaataaattatatcacttcatttacgaatcactcattttttcgtaaatactaaatctccattatagatatcggtcttctcatcagaagttacattaattctcattaaaagactgttatatccggtttcagcttcccaaacgccttcattcgccaattgtatcgaataatcgggattatccctcaatgtttccataggatccggcaaattcagataaatatcataatctccaatcggcatatcggtcggcaatccagcttctatttcgatagtgctttccatatcgggtttccatttacgagggtcgacatcgagaggcaaaacataagtagtctggtccgatacatttctcaaagccaactctaccgcccgaggattaaacggagcggcatatccttcatttttcacccgcaaaacgactttcagtaaatgacccggagtcacattagtcgtatatccgcccgaagtaaggacaaaacgatatcccatctcccgtttaattttatccatacagccctgagcgatccaacgatcgttcacgcctttataataatcgctgttcaaataagaccaacgaaggttacgcatttcttcctgagccttactacaatcggcaggagaaaccccatcgggaggacaagtctctccacccataggcaaataaagaccttcctgacctaaatattttttatcttcggtcacattttggtacgttccataatcggtctcactggccatgaaacagtcattgtggtggccaatacgcgcggcaattccattggtataagcatttgccgcagtcaatgccgtggtaggcttcccgttcaatcggagatattcctgcttatattgaggcgtgcgcacttgaacaacacgttcctccggcaatgcttcaagcaatttatcgaggacagccttacgagccgacggtgtattcaagttattggtcgtataataccactctccccaagaacctataaaccccgcttgccaaacagctattacatcggcgttctttgccaaatagggtttcaattggtcgatatgtgtttgaataatagacagcggtgcatcaggctcagtctccaaactagtataagcaaaacgtaacacacactttacaccggcctcccgcatagccgccatatctttatcgaaaaattgaagagcttcgtcagtaagagctttatctctaaaatttttcaaatagaaatacctgaatatcaaagaatatccattcgcacgataatttttcaacgtagatacactcaacgctcccgaaattcccatttcacaagaagtcgctttataaaaacctcgttcgggattaacgattatttcattggaagccttataagaaacctgctccataggaatatccgattccttattgttctcattttccttctcacaagaagtacatgccactcccaaaaacatcaatgcaccggcactgaataatttaaatatcatattcatagctctttcatttaattattgaattaatgtcagagaaaccggtgcccctcgtttgagggacaccgatccccatctcttaaatagtatatccgggattttgaattacctttcctttaccatcgacaataaccgacggaggcaatggatagacatatttatatttcgaagcataaggggcttggtcggcattcaattccaataccctatccaacagtttgtcgaaacgaatcaaatcggctctgtattgaccgctttcacaccaaaattcatgagccctttctatcaacaactgatcgataaatgactctttcgagggaaaatcggataactttttatcatcgagtttagcccggccacgaacatcattcatcaagtcgacagcctcttgcgtcacactgccgcccggtttcatcacgatagcttcggccaacgaaagcaatacatcgggataacgatatacgactatatccaaatcggaatatccgccactaccgggaaccgcaggatcgatctcatacttttggggaagaggccccaaatcgagatattgatcgggattttcccgattacgaatctcaccgtctcctgtcgtatattcaggaatcaaataggttttacgcgtatcgttaggctcgaacgaatcataaaaataccacgtgctttgtaccgtcgcccaaccttgaacgagaccatcgatatccggcggcatagccatcatgtgccactggttctgactgggaccatcaatagcacaaggtattatataaatgtattccgacgtgcatttagactgtcccgccaattcgaacaaggacgggtaatcgtcgaccatcgcatagccataatcggccgtcatcatctctcgggcaatagtctctaccttgttataataagattgatcctcgggagtttcatgcagatatagacgaattaacaacatattggccaaacctttactaaattttccatactcggtatctttcggataaggcaaattatcggcagcgaatttcaaatcgtcttcgataaacttaaccatctcctcacgagacaaacgaggaagcggagcttcattcaacggctcatcaagaacttctaccggtgcaattaccagcggaccgaacatatcgtacaaaatgtatgacagataaccacgagcacaacgtacctcggcgatataacgatctttttcctcgcgagataattcgctcttttctatcatattcattaccgtagtacaacgacttatcttaccgataaaaccgtaaggctcgtcacgagtataataaaaataggttacatcggtagtttccgtattgaaagaaagttcatggcaatacttctgagcgccaaactttcccgccagaatttcggtgcaagcatcgttcacaaacatttgccccctttcggaagtcgtattgataccgtcccaccagctaccacgcagaggatagtaacacgaaagaaccattgcctccaaatcttctttcgattgaggaaagatagacggatttatatcgctataatcgattggatccaactcgcaactattcagcataggaaccaacagcaacaacagtgtaaattttcgaaaaatctttttcattgtattccgtattatattgttgtctactaaaatttaatatctacaccgaccgtaaacgtgcgggcattgggataagccgccgcataagaatcggtttcaggatcgagacctccataaggagtaataacgaatacgttatttacatcgacatggaaacgcatattctggaaaattttccgtgtagtagcagtagaaggaaccgtatatcccaacgttatattttgtaagcggatataccaagcatcttcatagaaccagtctccgtatccataggtcgaacccgagaaaaaagaactgggatttttagtcgaaggattatcgggcatccagcgatcgtcgagacaacgcaatccgttataaccatactgtgccattccccaagcagaaacgccataagccatacgggtgggatccatcatcacccggtcgaaagagccgtagaaattgaaattcaagtcgaagcctttgtaccggaaagtattgttgaaaccaattgtaaacccgggatccgaagagcctaataaacggttatcggcatcgtcgataataccatctggtttcccggtcaagacaaaacgtccgttacgaactacgggatcgccggtctcagggtcacgcaaataaccgttcaagtcctcaataatcaactgacccggtttcaaatcgggttgcgcagcaggagcctcgtctccctcttgcataataccgatggccttacgagaataaatggcccgaataggatcattatccccttcgtataccgaaggtttccaatcggtcgtatgctctacccaccagtttttcacacgagaaaaagtaatatcggagaaccaagagaaatcttttgtcacgatatttttcgtattcaaggtaaattcaaatccccgtcctcctgtcgtaccgatattagccgaaacgaaagtcaggtcatgatatgtatttaaaggtttatctgtcaacaaatccgttatccgacgttcaaaaaattcgaacgtaccgccaatacgtccatcgaacaaagcaaaatccaaaccgacgttgaactctttggttgtttcccatttcaaatcgggattttccaaacgccctaaaaatacacctgtttgttggctattatcctgtttattatatgccaactgtgcataataagctgcaaaagcattattggttacacctgtcgcatttcctaccgtaccatagctgacacgaggtttcaacatcgatactaccgagcgggcaggttccataaacggctcttcggccatattccaagccaatgccacggacgggaaatagccccacttgtgattacgggcaaatacgctggctccatcggcacggaaagtagcggtcaacaaataacgatccatgaacgtatatcctacacgggcgaacgccgaataaatcttattctcactaccaccggaagccacttgtttcgtaccttccccagattgaagactgttccataagaatgcatcggtgataaatccattgttgccagcacttacataatagtccttattaaactcggccgaccaacccactaccgcattaatacggtgattacggttgaactctttcatatagctaccggtcgtctcgatcagatatttctcgctatcgttttcactaatcgtagcgataccgtcggaaagaccgccaaaaagagtctccttaggcatataagtcttacgactttgatgagccctatccatacccatactgaacttgaataccaaatctttgatcggttcataagtcacatacgcatttgccaagatacgatccatcaatcccttatccgtattcaacaacaatgaggccggattcggctgggtcggtaactgcggattgacaggataattgccatcttcatcttgcgccggaatattcggattcatctgtacggcagcccgaatcatacccgatttttcatattcttcggctccgagctgcgtattatcgttggctatacgagaagctgtaatgttgacaccggttttgaaatatttattgataacctggtccacattaatttttgccgaataacgtttcattcccgaattttcaataataccacgattatcatagtaattcaatgacatcataaaattggtatttttgctaccgccttgcacactcacattgtgttgttgcacactaccgttgcgggtaatcaaatcgagccaatcggttccttcaccggcagctgcaatctgtttatcggtaaacgacagtttataagccactccgtttttgggagaatcgattgcctcctgtaaagtacgattaccatagggataaacgttattctcatacatccacaaatcccaagttgcggtattcatggcgttcatccactctttcagattatagacatcgtaattatcggtgtattgctgaatagaataagaccccgaataagagacaaccgtccggccctcttttcctcgcttggtcgtaattaaaactacaccgttagcagcacgggaaccatagatggccgtagccgaagcatctttcagaacttcgatagattcgatatcggccggattgataaaattcaatacgctctgtgtcccagcaaccattctttcattcgtcgtcgatggttgttccaattctgttataggaaaaccgtccactacgtataaaggagttttagaaccattgatagaaccctctccacgtacacggatatccaatccaccacccggctgggcactattctgagaaatcaccaaaccggcagcttttccttgcaaggcatgagcaacagaaggtgctaccgcaagattaagatcatcgctcttcaccgaagaaacagatcctgtcaaatcacgtttctttaccgtaccataaccgataacgacgacttcgtcgatgtaatttccattttcggtcatagtcacatctaattttttcgaaccgcctattttcacctcttgggtatccatacccacatatgaaaaaacaagcgttccatcggctggggccgagatggtgtaaaagccgttataatcggtagaggttccttttgttcctcctttcacaagaacactgacaccgattaacggatctccaacaacatctttcacaacaccggatatttgtatattctgagccattgctcccaaatatccgcacataagaatcaaggagacgaaaaatcgcgtacaaaaccgaaatttcatactgtgttttccatgattccgttctactttctgtaatagattcatagatcgagatttttagtttgttaaaaaaattatatagagaaatttggactttcactttttcacctcgttcgcttggaacaaaagcgctctctcaaacttgcaatgcaatcgagcttcaggaccctcaacctcacccaacgaaacttcattgaagtaatcatacagttcatactttttaccttcttccagacctttcacaaggatatcaccatcgaacgacgaagcataaaaagcgtaatacaatgtgccgtccttacgaatgacatgagcttcgggacgagaatagccgatatcatacaagccatttacatattctcctgtcgaaagcatcttctcgttatatagcgagaaccatttcttccagataacctccttctcaggagtcaatcgataatcggcttttaccttaggattattcttgggccaagtaaatttggttcccaatacggctccaataccgaacgacgaagcaaaatcatcgccattatcgctcaattcgacatgatcgccgaaataggccgttcgaggaaccagtgctttatagacatatcctttcaaacgtacttgccagctactggtcgggtcggaggctaccgtttggttggtataaggcaaattataaaaagacatacagcagccgcagggacagttttgaataaccgcatgcggattgattgaccgagattcgtcatatatcatcttgaagaatccgggtaactgctcataagaatattggggacattcggggtgatgcttccaattataatcgggatgtacgctattcaaatgctgaccatcgagtttcaatccgtcgaagtcgtattttttcataaatcgatccaccagatctcgactatacgacaccacgcccgaatcgacaggggaaaggtaataactgtcccaccaagtaatataatgcggggtctgttgcttggaaagcgtaataaaatcgggattttctttcagcactttcgtacccggatcggcagccagcggagcccaccaaagttgaactttcaaaccataggccttcatctttttcaccagatcgaccatatccctatcgccaccggggaaacgtttggtatcgagctcccagtctccttcggcaatttggtaaccgtcatcgacagtcgcccatttgatgcccaattctttcaccttaggcaaagtccctaagatttcggcaaaagtagcttctcgttcatatccccacgcacaccacatgggctcgaatgcggccggttccgattcgggcattaccagaccggaagcctgcatatattctgaaaactgtcgaagcggagcaaagcaatctccttcatataccgatacgaatgtccgcaccgtagaaatcgtatcgccctgtgtaaatgccacgaccgattcttccgcactttcgaccgcaacctctgcatagttatcgtatttcgatttcttcaccggaagcgagaccaaccggggagaaagttctacatgtcccacggcaatgccttgatctctacgccacaaacaagttacaggaatacctccaccgtaatccgaatcgttcattcccatatagttacgttgataaaaggtagaatcgactgggagaatccaatcggctcgttctatggtagactgaccttgaaaagaccagaacgccggagtatcttcgttatcgatcacccggaacgcatggtttacccacttcactacatgtaaatcgcgagacgattcattcacatattttacttcggtaacggccataccggggaaacgactatccacactaatcgtttgtatttttttgatagtaccgccgaaaggcatcgaagcctctccaatcaacgtatagacagtagtatctccggctacccgaatatcccggtgtttcaatttaaaatcagataccgtcccctcttccagctctatatattcagtctggcttttttcggtcaaaggagcatcatttccggttaacccgaccgtcatgtgcatatccttatccacagacagaatcatcggaccgctttttatttcgagaccttcgctgcaagaaaacagtaaaaacgaggacagtattgaaataatcgtgtatttatcgatgtgtttcatggtttcttttcttaaattatttcataattcgaatgaaattttcccggtagatttttcgcaagacttcatcgggaaggtcaaaacccgaataataccagtgatagtgataatcgggaacataaaagtgttcgtcgtcggtttcgagaatccgaaatgtcgtttcatacatttcggcagacataccgttatcagtcccatataaaatgcgatcggcgtaacgagtataaaatttcttcatgtagcgaggaatacttgccgtctctccgaaacgggccgacatatcgacatataaattggaatactcgtcgagtaacctccccacgatagaaagatcataactgcaattgatgaaatggcaggcgacaaacaacgtgttcgggtgattcttaacagcctccgaaaattgtgcaatcaactgttcgtgggattgcatgccgggtatggacatatcgattttccatttcttcccattcattagcccatcgttatatttatcatcgggcagatacatccaataaggctctgctacatggatattcaatggcatccccaactctgcacaagtttcataaatcggcgacatcaaagggtcattcaaatggattccttcggccatattcgtctggaatgcgacatatacgcccaatcctttatcggttacctctccgacacccttagctcccattttatggcaacgcttcaattcctcgacggctgtttttacaaacgaagactttccgtaatccgacaggtcgaggccacaccacaaatcgaaccggtccttataaggagcataaacttctacgatggaatcgaaagaagccccggtatatccagtcaatacaactgttttctcgatgcctttcctatccatagttttcacccactgagcaacctcttcgagtgaagaagggtaatcgtgagagtgtgcatcgataaccggatatttcgctttctcgaccttcgtttcgggtattttataaatagatttcggcatatactcttccaacagtatattctcctgtccatacccggtcgaaacaaaaagcaaagcgactaaaaacagataacagtgtttcatataccaagattaagttcgtaataattcttatcgtcattcggtggcgcttcccaccattttatatttatcgcacaatagttctaccacagaatcggtcgccttagggaatacttttcgcaaatcgatttcatcgctattctgcaaggtttgtttcaatgcccgcataaacgtgtcttttatctctgtcgccaaattgactttggctataccgttgcgaatagcctcccgaaccatatcgtgaggaatacccgaactcccgtgcaaaaccaaaaccacatcggttgcggcatgtatctcggccaaacggtcgatatcgagacgaggtgtcgatttataaaatccatgagccgacccaatagccacagccaaagcatctacctgtgtagcccggacgaaacgaacggcatcttccacggtcgtaaaaccggacgaatcttgcatttgtcccaacttaggcacatagcccaattcggcctccacattagccccgtacggtcgagccatctctacaaccttacaagtcgtttcgatattctcctccatactcttttcgctggcatcgatcattaccgactcgaatccggcatcgaggcaacgttgcaccaactcgacagaacctccgtgatccaagtgtatgcaaccgtcaagccggtagtcttcgagtccctgacgcgccaatacaaccgcccgcttcaatcccatataatcgatcgagctccttgtcaattgtaacataacaggcgcctgcactcgcgatgcggcttcgagtatgcctttcaaggtctcgtagttgtaaaaattggtcgccagaatggctttcctttcaagctgaaactgtttaagtttttcctgaactttcatattctgttataatgtgatgtgctgattaaacctattccgtgctatctcctcgatggtctttttatcggcaaaagctcccgttcctcctgccgcagtcgtgttgatggcgcctgtgagattcccgaatcgctgacaatcttccaaagtctcgcctttgacaaatcgcgaaatacacccggcattgaaactatcgccggcgccgattgcatccacgacttccgtattcaagaacgaaggcagaaatgccggttcttctccccgacgaaccaacagagatcctttactccccatttttataattgctgtattgacataaggttttattttcccgacagcttcatcgatcgtttcggaagaggtcaataacataagttctttttcattcggcaaaaacaccgaaaccaacggtaaaatgcgggtataatcgaaatcccagatttctgtcgggtcccattgcgtatcgagcgaagtcgtcacgccttgtacacgagcgtaatcgagtattttttccaaatcggcttttaacgccggttgtaggaatatggaagatatatggatatgacgacatttctcaaataccgatttgtctatatcggcaaacgacatgaccgccatcgcaccctgataagttaccatagcacggtcttcgccataattcagtacaatcgtcgcccccgaagagtgttcatcggtttctatcaacatggaggtatccactcctttggcttcgaggctctctcttatcagattaccgagagtgtcttgccctatcattcccacaaagcccacttttgcacccaacgcggcggcattggcggcaaaaatagcagtcgagcttcccaacgtaagaatcatatccccggcaaatttctctttccccacttcgggctctccgtcgatattattcagaatcaaatcgacattcaactccccgatagccaaaatatcgtacggtttcatagcagataatcattaaggtttaccaaattgaacgcgttgaaatacttatccatatcgtgttcgatgcgcatcaaaacaatatcttcggactcataaccattccgattcaagttttcataaagttgattgcgggctactatcgcctccggtttttgccagatataacggcaacttgtccgcactaaccataacttcctctcctcggaaagctcattgaaatgatggcctttttccgattcgagcaaccatttgcgccaacgattcgattcatcgacaagtttccaaagcacatttttcatatcggaacaaacagcgactcttccctccgcatgaagtcgcttctctattccttcgagttccatcaacgcatcatattcactgattgtaaactcaggccctacattggcggctcccattccgcacaacggataatcttcgggattcaaaaccccgtcggtatagtgccccttgatgtagcttccgaacttcgccaccttagcggtcaatttacgcgctacctccttatcgaaagtaaccgtatgcaaatcggttcccactttaccgacaatgaagcagggccatacatcgtccaaaccgcaagccctcaatccggctttcaactcgacgataaacgtatcgaacacactctcatcggccaaaccgccatgaacttcttctgtccccacttcatacgaaaccgggggaaaaccgttagaccggcggaatgtttcggtatgttcgatcagctccaccgtacgtttagccaccagatgtatatctatgatttcccctttgggaacatgaatatcgacagtcggatcgacatgtatcaaatcgtaaccggcagcgaccgcagcttcgaacgatttcttaaccgcagccatagctctatcggtatcccatttctcgacggactgtatatctttcaaccacggccctccgtggtccacggccacgatatagggccccgtataatcgactgcccgagactccatacgcaacacatcggtaaaaaccgactgagtcattccggtatatcctccgtcgcaatcgacttgattaagtgtcgccgcaaattttataggcgcattatttcgcttagccgaacggaatgccgctttaatgaccgccatcgaattggggcacacggccaacaacgtgcgggatatatgttgcgtttctttcagttcggcaatcctcctcaggatatattcagttttcggttgcgtcgttttcatgtcgttcgatttaaaggtcatagattttcacaccttccactacacgggatatatttcccgaaaccgaaggttcatcgggattcaatcccaaattctccgatttgaaatagcccaataattgccccaccaaaacataggggatacaggcatattcatttttttgcaattccccgggatttgtcgctgcaacgacacaatcgagattcacccccggtatgactatccccgaaggcgagaccactatttgagctacgactttattattttcgttaatttggcgtatcagatcacgctcgtaatgaaacactttttcatcatctgaacaaagatatacgagcacggtatctttattgatcacagctttgggaccatgacggaatccaagaaacgaatcgaacttgcaaacgaccaatccatcggtcagctcttgtaatttcaaatgacactcttccgctattcccttcaatgcgccggagcctaaaaatacagccctaccgaattttcgcgcagcaatctcggaaagcgatttttcaccgttcttcaaaatatcccgtgcaaaagttactatcgcctctattttacttttttgctccggcaactgctctatattgaaaatcaaaatagagaccaacgccatagtcgtaaaactgctggtcatagccaatcctttgtcgtttgtttccggtggaagtaacaccagcaacacattatcccgagaactttctctcgctaaatcgcccgtttcattacaggttatgataatatgaaatactttcttacaatatttatcggcaatatgtacggccgctaaactctcagggctgtttcccgaacgggcaaaagaaatgaggacgacaggttttccggtaggcaaacaactttcgggataagtaataatatcggtagtcgctacggctcgacattgagaatagcctttttccacaaaaatcccggccaatgcatttccgataaaggccgacgttccagcacccgccaagataatttcggtatcctttccgatatggttgttcgaaatgaaagtttgtatcgcggcttcatttctgcaaaccaaatcatacgccttcaaccaaacatcgggttgctgcataatttcacaatatgtagccgttttatgatcgcttaaatccataaagtactgtgttaaaataaattgagaactctattatcactcttcttgtcctatttctctatcacaaatatagacaagcgaaactttcgattcgaaatattatatcaacaaatatctaaataatactttatgaaaatctataaataaaagattatcaataatttatataaaaataaaaatatttcgaaatgtttcgattgttaaaatacattataaaacaaagatttatcgatataatatttattaaattatggtgtattctaaaaaaacaatctaccttagtaataaaataatttggtataagtttaaaatcaagcacaagcactttcgattcgaaatatttttatcccaaaaccttatcattaaactacgcaacaatggaaacatactattcagccaaagagcgccgagcgcaaatcctacaacttctaaaaagcagtcccaaaatattggtatcttcccttagccaaatgtttaatatatcggaagttactatcagaaaagatttagaagagcttgaaaacaggaatttattgatacgagtcagagggggagcaatacgtttaccgaaattaaacattgcagaagaacaagctacgactgagaaaaaaagatttcattatcgagaaaaacgaagtatcgggcgcatggcggctacactgatacaagaaaacgaaaccatcattctcgattcaggcagtacaacgatggaaattgctaaaaacctgcactcgttcaaacaattaaccatcattacaaatgccatagacatagccatagaattaagtaaatacaaacggttcaatgtcattttactgggcggtcatttaagagattcaagtctctctacggtcggtcccatagccgagaacacgctcaaaatattttattgcgacaaattatttctgggtgtggacagttttaatttggaacgaggagtttctactcccaacatagaagaagcaaatatcaatcaaacgatgattacaatggtaaaagaaactatcgccgttttcgattcatcaaaagtcaataaaaaaagttttgcctttatcgcccccgtttctaaattgagtgcaatcgtcaccgacaacaatatgccgctggacattaaaacacaaatcaaaaaaatgggggtgaaactatacgaaaccgagcctgattcataaaaataaatatatatgattaataaaagaggatactccttataaacgggaatatcctcataatagtattagatcgataatcttttatcaatagaccgtattctgcggatccatatttgtccaaccggtcgtccaattattagcagcggtctctgtgggtccgaacgcacctatataggccacttgttcaaaaccggaagaaaccagagaatggctccaatcggcggacagacttattaacggactgtcctgagaaggaaccatgcagaacgatgtcaaattctgagggtctccttgcagtttcaaatcgtcaatagccgtataagcgatattcttgcctccttctctattgaaataactatctgcaaaagctccgttatccgaaggatcgaactgtgtaccattcgcccaatattgtgcatcttgataattcttaaccataccggcgaacacacaattcgaaacgaccaatttcccctcggtggcatgagtctgagtctttgagtttttatcattctcgatgattaatccaatggggaatccggcaaatacagaattaaacactctcaactgtgtattgcggcgcaaatgcatagcagcctgaaaacgagcatcagtaagacttccatttacgccagcctcattagtgtaattcgtcggatcgagtaccggaccgaacatcgatacgtttgcaaacacgcaggaagtataaggttcaacggtcgcagcgtcggcacaattatcagattcgaagccgttggatgccgatttatccccaatcttcggattccgcaaagcagccaaaaactgcaatttaccagaaaatccgttatccgtatcgaagtcgtcgtcccaagttcccaacgctaccaagtgtttacaatttaccgaaccgccgaaccattcgtaagaatcgtctcccgagtaagaaacttgtacataatcgactgtcgttccgctacccaccgaaccaaacgtaatggcattgatttcattatcagtcgaatattcgataccggcaaattcgcaacgcacatatttcaatacaccggagttatcggtatcgtcgttacctccatgtttacttctgacacctccttcgatagtctgctctcccatgttgtttttggctttacccaaaaggataataccgccccagtcaccgggtttacgtttgcccggagcctgcgccgatgtaaatacaatggggcgttcgctcgtaccctcggcaatgagtttgcctccgcgctccacaatcaacgtagccttagactctttctctcctttgataactacacccggctcgatagtgagtgtagccccttcggtaacataaacgaaccctctcaaattataggtgttcggataggtcaaagtcatattggacgaaatctcgtaagcattcgaaccgtctcccaaatcgaaagtctctccactcggaatgggattatcattgttctcgtcacaacttactaccgccattgtcgccaagcatacaaaagcaattgttttgaatcgttttttcatttgatttttctgtttgattagtattatagaaaaggattaaaaactgaatgtgatacctacgctcaccgaacgtcccggtttatacgacttcgtagtctgttcgcgtttctgtaactttccctcggcatcataaaattgcggatactgcttatatactactttttcaccaatgatatctttcactccggctttcaactcgacgagtttaccgaacttcttagacaccgtgaaatcgagactattacgcggtagttcataggtatcggggatattcacgctcacatcattcgtagtactgttggactttccgatgccgatgatacgctttcccaaacgattgtaaagcaacgacgacatcaatccccacttttcattctgataataaagtccggcattgacgatataaggcgattgcccttgcatttccctgtcttcggttttaacaatacccgattcgtcgaaacgtactctactctttatcaaagtagcattgagtaaaagacttaatcctctcattcctaagaaatcgagagacttgcgaatttcaatctccgcaccgaaactctgtgccgaaagtgcgttctcataattatatcgcagcgatcctcccatatctataaaggtccattctatggggttcttgaaatatttgtagaaaatacctaagctgatgacttctccccgttgcgggtaaaactcgtaccggaaatcgaggttgtctatcttacacgtcttcaaattctcgttcccgcctatttcattaaaaaggtcgaaatcgtaatatacagccggcgaaacctctcgaaactctgcccgattcaaagaacgtccataagccagacgaagcaaattgcgctcatcgaaattgtacgtggcattgaccgaaggcaataaatcgagatcggtataattgcggctcgtcatcaacacttgcgatgccgactgagatttatcccatttcattctcaaccgattgtattcaagccgcaaaccggcatagacattgaatttacccatcggtaactctatcgcaccatatcccgctccatatatgttgtatgcctcataagcatttttcttatcggtaatctcgtctataaagactttatcggcactcaaccaatcctcgctcatcatttcttcataaggcagatacaggtaatatgcacgttcttcaagagagagattctcgtaccgatagataaattcgcgaggcgtataattacgggtacgatactcggatatcaatccacctttcaccgtagagagtatctcgcccataggaactgttcccttgtagtccacactacccgaaaagacatggtcggacaaagattggaaataacgtttgatgctctcattgcctacttttaactgcgacacgtctactccatcactcattcccgcctgattaacgactatccggcggtcgggttcggttctataagcataactatatcccatgttccacgccagagaatggagcttcttctcatctaaaaaatgattaccggtcagctgtcccaaatagctcagacgcgattggtacaacatctccgtctcttcccgataggttaaaccgctcacatttctttctcccgagcgttcggtcaatcggtttttacccaacatattaaacaggtttcggaattccaatttattttttccatcaaatacaaaagcccaattgtgcattgcacccaatcgcacatcattggaatactggttatcgacataatcattgagatacaccggcttatcggcatcagaagaataaataccgaaacgggcattcgtgatatcctgtatcgttttataagtattactataattgatataggtagtcatacctatatctgtcccgccctcggtttcgaaccgccgattaatcgtcagagataaacgttggtcgggaatcggataataacttttcactcgccaatcgttattaaacgagcgtgtaagccgtgtaacttccgccggattgctgccggtaacgtccatgtgcgaaggcatgccattcggcaaaggtctcttgttcaaatcgaaccccaaccaatcggtagcactgccgggattcagacgcgtttttacaaattgagtattggtattgaatcctgtcgtataaccaatctgaatggagttacgtaaaggtagactcttggtggaaatacgaataaatccaccggcaaaatcggccggaatttcgggagccggagacttataaataatcatattctcgatttgagagctgggcaacatatcgaatgagaaagctcggctatcagattctaagctcggagagctgttcccattgatccacacattattataccgttgtgacaatccacgtaccacaacaaaccgatcgtctattaccgatatacccggcactcgtttcaccacttccgatgcatcacgatcgagtgttttggcaatctgttgcgaagatataccactcgctacctgtacttgcgctttcattccttccaacaaagacatctccgtatcgttcctgcgataggtagaaaccacgacttcattcaaggcgaccccgtcttcctccatctcaatttcaagacccgcgatagactctccctgcttcacattcaccggaacccgaaccgtcttataggataaatatcggcaaacaatcgtctgctttcctatgggaatatttttcaaactaaactttccgtccaaatcggtagctgtcgctaccgaactattctctatttgtacggtggcccctataattgcctctccacttttcttatctctgacttctccggtaatcaaacttcctgccaaagctgttatccccaatgcatgaatcgaaaaaacaaaacctaaaacaaccgccagtaatccgcttttatacatatatttttacctttttctttccgctgcaaaagtaaaagcaaaagaatacgaaaacatgacagcaatatgaatcgatatataacatgtattacattatcgtataccgaattttgcaaatatatttcagtacgatatgcaatattgtatctcaacccaatagacccacagagaaaaaactatctatcgttcgacctacatgtagcgctttctacggagctcgcataaaaattcagcttatttaacaacttctacatgactgatttcctgcaatggttacatttatgtaagttactaatatcgatgtttcttcttgcaaattgtttcgcaaaaatccatctttgtattgaaaaacaaaagttattaacgataatcgaagtaaacttaaaacgaaaaaacgatggacaaaatcacaaaaatcaattcaggagaaaagtttacccacacatctgtcggaaaactcgccgagttcaatggtaaacaattcctcaaagacactgtcggtacaaccggttgcgaaatttcattcgggacaatagagcccggccaagccgcacctttctttcacagccataaacaaaacgaagaaatttatattattctcagtggcgccggcgactttcaagtaaacgatacggctttccctattgccgagggatcgatcgtccgtgtagccacagcctgcaatcgttccatacgatgcacatcaaccgaaaaaatgctctacatctgtattcaggcaaaagaaggtagtctcgaacaatgtactatggaggacggtgaaatcacccaacaagaaacaaaatggtagtaaaacaaggaggctgttcttgaataacatagaacagcctcctctcacatcatagttaaagttatttattccgcttcaattccaacaccactgcaccgccagcagtaaaaaataccaaattcccattttcgagtatgccataagtcctcacattattcaaagctgaaagtatgtttttctctgtctccatatcgggacacatcatacgagttgcagccacaccatggaaagagatagaattttctacggtctcatcactccgtaattcccctgttatacgattacaacccgagtttccacttattcgaccgtcagcaatatcaaacttgacacccggtcgcacttccaaatcggtagataaagtatctccatacactttaacaatatcccattctccttccaattcagataaaggaactaccgaaaacctcttactcaataacatgacaggttctttatccgaagcatacagggcaattttatttttacccgcgcgtttaacgttctttaccgtagacaacacttcgataagttttccttccaattccatatcgggacaagccatgagagtggatgccatatgacccaattctattttattgtctctggaaagatccagactccccattatacggttacaaccgctatatccatatactctccctttcttcgtatcgaatccgataaaggggttcgattgagcccgaaccggttcaccctgaatttctaccacgttccattcaccacaaatatcattttccgataccatatctctcgccgttttacaagaagacaataataaaactcccaagaataccgacaagtacatcttttttgcattcatatctctattttttaaatctactatatgcgacttcaataaataattggagaaaagaatataatactgcgtctttatatattaaaattttttaaatacgctatttcccttcaaaagtctccctttcctcgatagtatttacaatatccatcatacatttttgctacctttactaaatattcatttaaactacggatttagcatgaaaaagaaaaattttattcctttcattgcaattgctgttttatgtgcagcctgtcacgacaaaactactttaaccggagattggattgaaccagtaccgggtactacaaatacgatacaaggattcagtctgaaagaaaacggagaagcaacgtccatcaatatggccacccttcaatataaatcttgggcgcaagaggacaaccggctcattctatcgggagaaagcatcggcaatcaccaaacaatctcattctctgatactttaaaaattttcaaactatcggaagacagtctgattttgaaaaaaggtgatttggttaaaacatatacacgtcccaaaagtatcattccagcgactccgatacaaccagctatatctactacgtttacagtaaaagggaaattagtcatcggacatgaagtacgctcttttatcgcagaaggcgacaccacctcatattggatcatcgatgattcgggaacactgaaagaggaatatgaaaaaactatcggcaacaattccgagccatatactccggtatatgccgaactaaaagttatcgataccgggaaatcgaacgagggatttgccgctgaatataccggagtctatcatgtaaaagaagtgttgaatatatccccgattaaaacagaatagacgtgtagccatatcatgaatatagcctacataggtgcgaggataaagattccgtaaaaaattcgtggggatagacctgtattttaataaagaatctcttgttggcaaccacgttacgaactcctcggcaaacggtaaaaaagcagccgaatagatttttggagatattcaacccctccgtcactacgtgccacctcccctatattttgctatgcaaaacacagaggaggaggttaatactttcttaatacgttcctatatatcatgtttgttcttctcccttgccgtgtcccgtagcattacggggtgttgcgttagccatatagagaaggtggcacgtagtgacggaggggttgaaaagcaccaccttaatcagtccgtttatatcagatatttaaccccctcgccctacactcctcctatctcacctgcgatgagcagagggagagttgaattcatactcctccactgtgtttttgtagcgcaaaaatataagggagacaccgaagaacgatagtttctgaggagagggagtagaatatacaaggacaatctccactaattatcgactgaaacagaataaagaatatagacgtaatacattttgatgaaaataaaagagtgatgaaattcatcactctttttgtagcgagaccggggcatgatcccgggacctcatgattatgaatcatgcgctctaaccaactgagctatctcgccaacatgtttatgtatcgcaccgaccgattgtcaaatgcggtgcaaagataagggattattttatactacacaaaaaattggcttactttttttactcaccaattcatgcaatccatcgccgtatcaaccgatatatctctccaatccataaaacggccgaggttgccacaaaaatatacacccagtccatcggttgtaaaggagtcacactgaacaatgctccacccaagctgactatcaaaatctgcccggctagaataatgagggtgacccacagaaatcctttgcatgaagccaaacgatcaaaagcggattgtacatttccaaaagccttcgcattgaacatattccaaaattgtaaaaacacgaatatggaaaagaaaagggtaagttcatatcgggtaagccctccgggaactggcgcaaagttaaagaaatgggtaaagaaaagcgacagatcgaactgagcgagcgatgtaatatcgacatgtttgaaatattgcaacagcccgaacaagagcaacacaaaagcaattccagtcccgatgatacctcctgccataggccgggtaacgatattatcgttcaaatgacgcggcttgtcccgcataacccgctcgtcgggcggcaaggaagccaatgccaaagcagcgaaggtatccataatgagatttacccaaagcatctgagtgactgtcaacggcgactctgttcctaaaaaagcaccgataaggacaatcaaacatgcggccacattgatagtcatctggaaaagaatgaacttctgtatgttacgatacagcgagcgtccccaaagcaccgctttggtaatactaccgaatgaattgtcgataatcgtaatgtcgctcgcttctttggcgacagatgtcccgtcgcccatcgaaagccccacctgcgcagcattgagtgccggggcatcgttcgttccgtctccggtaacggcaacgacctcatcttgcgattgcaacaaacgtacaagtcgctccttatccattggacgagcccgagcgataactttcaaatcggggatacgttccaacaaagttttatcgtcgagagccgcaaattcggggcctgtaattatattacgatctccgtcttcgggtgtccacaacgaaatctggcgagctatttcacgagctgtggccggggtatcgcctgttacgattttcacttttatccccgcattcaaacagtcggaaactgccgcaggcacttccttacgaaccgggtcggcaatggctgtgatacctaagaaagtcaatttgatatggggagccaagtgtccggcgatgaaacacacctcatcgggctcgaccaaagcataggcaaaccccaaagtacgcatggcttgattttggtattgcaacagcttttcttccagcatcggacggctatcggtcataggaacatttcctgacgaagtaacccgatctgaacagaaattcatcacatattcgggagcacctttcacataaagcacccggtgattcaacaacggagactgaaccaccgtagccatatacttacgctcggtagaaaatgtcaactgttcgattacctctgcatgacgacgcaacgctgcataatcgactccccggtcggccaaccaaagcagcaaagctccctcggtaggattgcccaacactttcacactgccggcagccttatctaaatgagcggtcgagtttgccgctatactctcaaaaataatgtcctccactcccgactcaggaatataatcgaaagccgcctcatgcactctcatctggttttgcgtgagagttccggtcttatcggtacaaatcaccgaagccgcacccatcgtttcgcaagcatgcattttacgaaccagattattattcgccagcatacgcttcatactcatcgccaaactgagcgtgacactcatcggcaatccttcggggacagccacgacgataaccgtaacagctatcatcgccgtcgataacagatagcttccgaacaataaccaatcgataacggggtgctctgtcaggtaaataaccgttcgagctataaaaataacggcagcgataatgtagctcgcttttgtaataaacgaagccaacgtatttagctgcttatcgaggggcgtttgcgtattattttctatctgagaaccggtatataccttaccatattcggtcgcatcgcccacttgcgtcacttgcatgacaccgtatccacccaacatcgtagagccgttcatcacggcattggaagggtatgtggcttctttatcgaaatcggcttctatcgtcgttttagtcgccatcggctctccggttaaagaagattcattcacctgcaccgatacagcactcaataaaattccatcggcaggtatttcatctccggcattcaacataacgatgtcgcccacgacaatctcccgtttgggtatctccaacatatgtccgcctcgtatgaccttgacaggaagatcgtcgtttacctgattgagaatatcgaatttcttagccgcactcatttcgaaaagaaagccgacaaccgtcgccaacaatatagccaaagcgatacctgccggttcgaacaacgccgacatgccggcctcgcccgtagcgatatgataaaccgcaacagcgacagaaagcagtaatgcgactaaaagaatacgaataatcggatcggaaaacttttccaaaaacaatttccacataggcgtacgagccggaggagtcaatatattttctccataccgttcccgactggccaatacttccgattcgctaagcccggaatattctacctcagatttcatctattctattattctattgatacctattttataaagaaaccgctatgcgaacagagctatcacctcatcgatggtaaacagggactgttcgcccgtagtcatatttttcaaagtgattttttctgctgcaatttcattttcaccgaccaaagcgacatactccacgcctgtggaatcagcatatcccatctgcttcttcatcttagcggcttcgggataaatttcggcccgtataccggcagctcttaaccgggctaaatgagacagacaaacctcgcattcccgctctccgaaattaacgaacaggacttgtgtcgattccatcgactccttcgggtataaatcgagctgattgagtacatcgaaaatacgatcggccccgaaagaaataccgacaccggaaactcccgtcaagccgaacactcccgtcaaattatcataacggcctccccctgtaatgcttccaatttgcacatcgagagcctttacttcgagaatagctcccgtataataattcagtccgcgagccaaagtcaaatcgatttcaaacgatgctcgcagagacgaagcggatagttttcgtaaaatatattccaactcgtctataccttttaatcccacctccgaggcggataattccctacgcaacacttgtaacttttcttcgttgctcccctgcaacagaatcaccggttgcaatcgggcgatggcatcttcggacaaacccttttcccgtaattcgtcattcaccttatccaatcctatcttatcgagcttatcgatagcgaccgtaatatcgactatcttatcgggagcacctatccactcggctatcccgctcaatatcttccgattgttcaatttaatagcgacccgtattccgaaacgggcgaaaacctcgtctatcatttgaatgagttccacctcgttcaataatgaatcggaacctacgacatcggcatcgcattggtaaaattcacgatagcgtcccttttgcggacggtcggctcgccacacgggctgtatctgataacgtttgaatggaaacgtcagttcattacggtgcatcacgacgaaacgggcgaaaggaaccgtcaaatcatatcgtaaccctttctcacataaccggcaagacaagcggttgagattacgctcctctaaatcggtctcggtaacatcggaaagaaagtctcccgaattaaggactttaaacaaaagtttatccccctcttctccatactttcccatcaaggtctgtaaagtctccatcgccggagtctcgatttgacggaatccataaaggccgaaaacatgctttatcgtattgaatatataattacgcttcgccatctcttccacagagaaatctcgcgtacccttcgggatacaaggttttgccatcatatttgataatcttattctataaaatttctacggggaaaaccccgatataaatgaactacaaaaatagcgtaaaccaaagacagaaacaaatttatcggattctcccgaaatacagcctatcttcgcttttcatgcaaaggtataacatttttcttttcaccacattttcagttctaaattcttagaagctgttttaaatttattgagaaataatattatcattgcaagcaggtatgttccggccatattgagccccagtttcgcatcttgaatcccttgatttttgtcaatagcccgctattgactgcatatctcggactccaatctgcttcaacataggcctcaatctgtctcggaataaatttaaaacagcttcttaatattaagaaaatattttcaacttttcaagtcgatgactaaaaacgataagctgttcctaatgaaatgcggccgactccgatgaaatgatgtgtattgggtatgtagtcatataacttatcgtcccacaacgtcatcgagggctccgcaaaaagatcgaacgaacgagaaacattccaccggaattgcaaacctccctcggccacccaaccgataccgccatcactgttataattactccaccctataccggttcccaacgaggctatcagatggaaacgacgatcaggatcgggttcaagaagcgatgtaagattcaacagataatcgacatgagccgtccccaagcaaagagttttcgacgtatggggtgcaataaaatcatatcccaagcctatttccatacccgatgccgatgtaaaccatctaccgaaagaaaggtctgcccctaccgaaactttccgataacggtccaccaaaatcgtttcactgaacaacgacggacctaccgaaacggaaaaatagtttctcttatcgaaagttcgttttcctcccgcaactgtattcccgcccaatttataattgaggccaaccatcaaacgagcctccgggtcgaagcccaagccattgtcattacgagaaacacgagatgcaagaaactgaggctcgataaacaaatcgatgcccgaagatacattgaaccgtccttgtactcccgctctgacgccataaacaaattcatttttcttttggctatttccgactccggcatacactccgcctaacgcaatgaggtcaaacaacctgtcggaattatatctgaccgtaaaagccgacagattaaacatatagtcggccgacaaagccagcgacatataacgtggcgccgcaccgtaatatccataatccaagcccaaccgccaagccgacaaaggagtgtaccacttgccgacagaaacagccaatccatgacctcccgcaaaatcatcgccagaccgtctcaatacccgtcccgtataggccaatgacaagaaatatttatcggacaagtcataagcggcatgattggccttatagtcatatcgatcgagctgatattgcagaccgacatttagagaagtcaacatgtcgacaggcaaaccggcgaagctctcacgagaatattttttcccgaaagccctcacttggggttcgacaaacaatccgatacccgaacctacattccacaatccttgcaaactcaaacccataccgggataaaatcccgaattatagctggtcgcataagatagtacggctccaacacccaatgtcgcatggaatatccgagaaggattatacccatacaacgtcgaattgatattccacaaataatcgagttgtacaagaccgaacttgcgataaccgggttgggaatcgccatacgcgcctccgcctgccgtcaaacgcacgcccgacgcggccgtaaaccatttgcccaaataaagagaagccatcggcccgattcgatccaaaggattagtgcgcaaccccttatgcagaatacctgctgctcctatatttaaaccgtaaaacatgtggtcgacaaaattctcgttacgaaattctacggttttctcaaatgatccgtgtttcattccgtaagcataaagattgtaggaaagccccgccgtaacagtcggcacgacatcgaccgaagagaacaagtttcgttcccaacggttattttgactcacattcaatcgaggctcgacaaataaatcgaacatatcgttgagacggaatgtcccctgcaagcctatacccgctccgaatccatgttggaaataaccctcggaagagacatagtcgtaattaaacccggcaaccccattcaaattaaaaaaccgattgctatcatacccataaaaaagcgtggaaaaattcaacaagtaatcgagttggccaccgacagccaatgtcctgtatggagagaactcggcatcgagagacgaataatttaacaataagcgagctcccgaaacaggattccaccacgtacctataccgccgaaaatacggaaacccttattgggcaaaggattggaaagcgaagatttcatcgcccctgcaaatccggctcccatcgttaaataaagatctcctatacgacgaggaaaatcaaaagcatcctcttccctcgccgaccgattgaacgacggcgatacaggacgatatgtaaatccggccaaaacagccggtagcggatcgacagcactcaacccgtctttccaagattcgttcgaaaacacatcgacacgaggttccacaaatacagcccaatgatccgataggcgaaactctccgtgcaaacctgtccccgcgctccaccgagtatgcaatttatcgtctacggctaccgaatgaaaacccgcacccaatacccccgacatctcgaacaaccggctcggatcatatccaccgaacaaagcatggagattaaacagataatcgagttgcaagccgaaagaagacttattatacaattcgtcggtcttcaaataacgcatcaatccagataatctcaaagaagaaacagaagtaaattgatttccaatcgacagcatagccgtagccccgggatcaagaaggagcccagaaccactcgtcaatgtagtcgccataccgcctcccgcagaaacgaaaaaaccttgatcggctccgaaaaaaggagctttacgacgcaccggatccgatagtaaacgataacctaagccggccatcaacgaagcctcccagtcgtaacgcatccaagtctttatcccgtctattccgtcggaataaattccaatacggggttcaagatagaaaaaggtcaacggagaaaaattaaaccttgtctgcatacccaatcgaaatccgccggcatgcgaccaattgccggtacgatatagtaactgatattcaccaccggcgacaccgattaactcgaacattcgaacgggattatctttatgcagcaaagaagtaatattcatcaaataatcggcagacaaaccgacaaaatagggattcacccctgcgagcccgttatgtaaccccgcatttaaccccacacgcataccgtgcaccggagaaaaccaatcgcctaccgtcaatcctgcacgaagccccaaaccgggagtagcgaacaaagaaccggccgaacgatcgagaatcaggcctgcctcccctgaaataaaaagatggtcgccaaatttctttttagcatacctttcatttttggcgggcttttgcaaggtataatccaacccattaaactgattattctccggttgttcctgcgcagccgcactaatcgtaaaaacgacgattaaaaatagcggcagtcgaaccaccgaagtaaaaccgcgcataatatatctcattttcatactttaatcttcctgttgtaacaaatccaatacatcgccatcgacactggcgacatctcgtaacgacggatctttcttgaacgcactctccaaataggacaaagcgagaaccacctcgtcgacacgattagccgccacggccttgatatactcctctttggccgaatttccgagcagcttcgctttttcccatgcttgttcgttcgacttgatagccaaaagcataagcacttcgttaaaaggcgattccgccgatatttcctgcatcacctcgttgtaacggccattcagcgcggcggcatagactttcgctttatgataaatacctgtatccggtaaatcgaatgccaaagagtcggcttgggcataacgcccggcagacaaccaagcgaccacttggttcaatcttgtttcatcgggcaattccggcatttcgagataaggtaaaagcagctctgaatccggctctcccttatcaataagaatagctgccaaatcggtagccgcaaccaaaaatttgggatagacctccaatgcccggcggcatatcgcctcacgctcggcaatcgaatcggcgagattgtacagccgccaaaattcattacgagacaaagatgcactatcgctacgatagagcgcttcgatttcttcgtctgtgagataacggtattgcgaaaataacagctcataacttactcgacgcaaccgaggcaaataccgggaagttatcaaagggcgataaaaaggcaacgatacgacatttctcgactgccggttcggattatcgggatatttatcgattatttcctgtatagcatcggcctctcggattttgttatccgcccgaagcaaatcgaccacccggtcccaagtctcgaccgatgctgtcgtatgcatatctatttgcctccgggtagactcgttcaactctttaacgatgagcgacattgccgatgccatacgtttctgcgccaactgtttgtttctctcatagttcccctccggcgatgccgttcctgcaatagaaaaactttttaaccgagcattcggatcgttctctacctgatgcaatcgggaaataagccgattcaattcctctcggttatccccatcggtgagattcaaatcgctcttgttcactctgaatgtaagattcacatcgcccttcgtatcccgcagttgcatctctggctgcgggaaaaaattttcgttctttaccgcactaccgggaatctcgtattcgaggaaacgcaacgggttcacaacaccccgggcaataacaaacgtatcgcgatagagcacccgattgtaattttccatcgagaccatcatatcgcaacggaaatcgtcatttacattttctacataggtcgagtcactatacccgaccagatcgtccttgcgggaagaagaacttttcacttgaacatatcgcgacaaagggtcttgacccgaatcataatcgtacatacgttcctgagtaatggcatactctttcccatcgaaaaccaaaggttcgagaaaaatcatctgttcccgagtgacattgtaaacacccggttgtataatcatacgggcattcgtagaaaaaagctctttgggaattttcacacgagtgcggatatgaaaataatttcctttcacttcaatatcggtgggttcgggaaccacattgtcggtaattctcttggcagaaacaactacttcttcgagagccactgccgaatgacgaagcacgacatcgaccgtcaattccccacggacggcagctttacattcttcatatcccaacgatgtaaacaataactctccttccgaatcgattttcaccaaatattttccatcttcattcgtcgagccgataagtttattggttccggcattatagatactcacccgaaatagcggttccccctcgatattggtcaccgttccccgtacatttatatcacgcgcagacaaaggcaaagcgcaaacgacactcaaaataagccctatgaacaaggaacaaaatttattgagattcaacataacaatctatcaattaaaatcacttaaatatataagagaaagatagtcccagccgaatagggacaggcgaccatttggaaagattgggtgttgccggtttttcctctccttcccgataatcgaaagcccgtaacttcgccataccgatacccaacgtagcttccatattccaatgacgactaaggacaaaagcatagccataagtgagaccggcggcccaaatatcgccctcataaagatgttctttaaatttcacattataaagcccacccaacaggcttattcccatgaaatgccgagccataggcctattaaaccagtaccgcaactccggctgaaaacggaaatgcgtggctttcatatcggcaatcgtaaacgaaaacggattagccgcagcacttatatcgagggtcaatctttgattcaacctcatttctaccgccaaattaggcgataatgtagcccaatcgatgagattacttttaagagcgacacgttgtgcattgaccatttgaatattcaggatcactcccaaaataataaagcatttattaaaaaccttcttcatacttattaaccaaccggaagccgatcccccttttcaaaaagcttcactcgaagttttaaaaccgtttcttacccaagtattaaataactctcaaaaaacggaacaaaaatatataattcattcatatatgcaaaataagcttatatttttatctctcatttgtataaaaaaaggctgttattcacatgaataacagcccttattttttaatattatagaagcaatgctcccttaactgtcccgtcgccctcctgcaaaaataataatgtagtacaccaacgttgctaacgaccccaacgctgccactacataagtatatgcagcccatttcaatgcgtctttggccttgtcgtgagtacttgcatcggtcaccccggctccgttcaaccaagccaacgccctttgactggcattaatctccaccggcagagtaataaaactaaacaaagtcgtcgcagcaaataaaattatacccaatagcataatagccggataagcctgtatcgtgagaatccctatcaataaaatccactgtacccaattcgaagcgaagctcacgaacggcacaagagccgagcgcaaattcaggaaagaataagaacgggcatgttgtacagcatgtccacattcatgcgcagccacggcagccgctgcgacactgttgccatagtaaacatcacggctgaggtttaccgtatgtgtggccggattataatgatcggtcaaatgcccatcgacctgcgttacagaaacatcgtttattccattctcctgcaacatacgcatggcaatatcccgtcctgtaaggccataaggaatgggaattttagaataacgttcgaatttactttgcaatgtacgttgtaccgcaaagctaactaatgcaatgactataaataatacgtaaaccataatcttctttttttaatatcaaattcgcagattgcgcaaatatataggaaataagggaatagatgtgttaatgcaaaagttattataacaaaagagtgttaaacaaggaatatcagaacaaaaactccgagataaagaaaagactcgaatccggaaaacataaaaaagtttaataaattatctctttcaaaatttatttatacatttgtgtctgacaatatagtcagacatataagacaaactacatagttaaacttaatttatcattcacatgcaaggggaaaaacagtacaaaacaggactcgatgtaggctctacaacagccaaaatagtcattatcgatgaatccgggcaaaccgttttctctcgttatgaaagacataacgcccaagtgaacgatcttctttccgcctattttcgggaagcccgtcaagaactgggcgacatcgaaacctctatcgcagttaccggctcggtaggcatgggaacagcagaacagctacgaaccgaatttatacaagaggtcgtagccgccacccggtacgcccagcaactatatccatctgcttcggctttgatcgacatcggcggagaagatgccaaagtcgttctctttcaagggaaccatatcgaccttcgcatgaacgggaattgtgccggtggtacaggtgcgtttatcgaccaaatggccgtactgttgggagtagacatcgaagaactgagccgattggctttgcaagcagagcatatacacccgatagctgcccgctgcggagtcttctccaaaaccgacattcaaaatctagtcagcaggaacgtcccgttgggcgacatcgccgcctccattttccatgccgtcgctgtacaaaccatcgtaacattatcgcgaggctggacattccacccgcctattctattatgcggcggccccttgaccttcattccagccttacgaaaagcattcgccgattatctgcatttgcaggagagcgactttattcttcctgccggcgggaaccttcttcccgcattaggctgtgccctatgtgccacggaagaaaaagcagtttctttatcgacattggaaaatctcatatcccgaagcaccaatatcacaacaaaaaacagcctacctccgctattcgattccgaaacggattatgacaactggaagaaagaaaaagcacattataactggccctctgcccctcttgttcaagggatacaagaagccgtactgggaatcgactcaggatcgactaccacaaaaatagtcgtgacaacccccgacggtgctatccttttctcgcactacgcccccaatttggggaatccgatagaagccgttcgaaaaggattgaccgaattaaaaacacaatgcgataaaaacgggacggtattaaacataacaggctcttgttcgactggatatggagaagaattgataaaagcggctttcggtctcgacggaagcatgatagaaactatggcccattaccgagccgcccgacaaatggctcccgatgtctctttcattctcgacatcggcggacaagacatgaaggctattttcgtcaaacaaggagctatcactcgcatggaactgaacgaagcctgctcgtcgggatgcggttcgttcatcgaaaccttcgcccgcacattgaaatacaacgtgtccgattttgcccgtttcgcctgtatggctttgcacccttgcgacttgggcacacgctgcaccgtctttatgaattcaaaaattaaacaggttttgcgggaaggagcgacagtagtagatatagccgcagggttgtcctattcggtcgtaaaaaactgtttgtacaaagtcttgaagttaaaggacgacaaagagttggaaggaacgattgtcgttcaaggaggaacgatgcataacgatgcgatcgtccgtgcatttgaattggaaaccggtaaaacagtcatacgaagtaatttacccgaattgatgggagcatacggctgcgctttacaagctgcgtctcaaaaatcgaattcgcgcacgataaaccaactactcgaaactaccggatataccagccgacaaattcaatgcaacggctgtgaaaacaaatgtttcgtatgccgctataccttccccaacggtaatacgttcttctcgggaaacaaatgcgaacgaattttcaccaatcggggggaaagcgaaaaacccggacagaacatatataccgacaaatatgctttgctgttcgaccgggaaattccggaaacaggcaacaaaaccataggtataccccgtgtccttaacatgtacgagaactatcccttttggcatgctctctttactcgctgcggtattcgggtcgtactgtccgatatttcaactttcgtcagttatgagaaagctctcaactcggtcatgtcggacaacatctgtttcccggccaaattaatgcacagccacattcaaaacctgattcacaagaaggtggaacgcatcttcctgccatacgttgtctacgagcacgaaagcgacaagaaaatgaacaacagctacaactgccccatcgtcaccgggtactccgatgtcatacgcagttccatgtcgccggacattccggtagactctccggccatcacttttgccgacaccggcttactcaccaaacaatgcacgaattacctaagttcttggggcatatcgaaaagagatgccgagcaggctgtgaaatatgcgttgaacgcccaaaaacaatattcgtcagacatacgccgaaaagccgaaaacattgtcagggaaagccgcagaaaagaagaaccggttatcttgcttgccggacgcccttatcacaccgacccgctcatacagcataaactttccgaaatgatagccaatctgggagtaaacgtcatctcggacgacatagttagagacaactccgagatagagacccaagacacttatctcatcaaacaatgggcctatatgaaccgaatcctgaaagccgcagaatggacagcccggcaagggaacgatattcaattcgtacaaatgacctctttcggctgcggacccgacgcctttcttctcgacgaagtaagagatattctacatcgtaacgggaaacccttcacgcttctaaaaatagacgatgtaaataacataggttctctgaaactaagagtgcgttctttggtcgaaagcctgaaacaaacgccgctacgcggaacgacagagaaattccgtacaacagaagtctttcgcaaaaaagatcgaaaccgaaaaatcatagccccttttatgtcggaatacatcacacctctgttaaagccgattttcaaattgtcggggtacgacatagaggtattgccaccgagcgatgcctcctcggccgaaaccggtttgaagtacgccaacaacgaggtttgctatccggccacactcattgtaggcgacattatcaatgctttggaatcggggaaatacgatctcgacaacacggccgtagccattactcaaaccggaggacaatgccgtgcgaccaattacttggcgcttattaaacgagccatgctcgatgccagattcggaaatgttcccgtagtcacattgggattagggcggaaagtttccaacgaacaagaaggcttcgaactgaaatggcaaaaggtattacctgtcgcactcaatgccctgctctacaccgatacgctttctaaattttatcatgcctcggtagtccgggaaaaagaacggggagccgcggcccgattgagagacaaatatttaaacctcgccgagcgtcccattctcgaaaacgagcctcacaagttagtggaatatatccaccttgcagcccgggaatttaacgatatctgtatggacaaaacctgtcccaaaatcggtgtagtgggagaaatattcctcaaattcaattcctacgctcatcaacatgtcgtacgcttcttgtgcgaacaaggtatagaggtggctcctcccattttattaccgttctttatgcaaggattcgtgaaccgcgagaacaaggaaaaactactcttagaaaagaaacgcatacctcatttcctatccgacttattctaccgatacatcgacaaacggatagccctgtttaacagaacggcatccacattccggtatttcacaccctttaccgacatctatgaagaagcggaagagacgaaaaatattgtctcgggtgcagctcaattcggcgaaggctggctactaccggccgaaatcatagcgttcaccaaacagggtataaacaacgtcatatcgttacaaccgttcggctgcatcgccaaccacatcgtatcgaaagggatagaaaagaagctgcgtatgctgtatcctgaattaaatttattatctttggattttgacagtggggtgagcagcgtaaacgtaacgaaccgattattacttttcacacacaatttaagtgcctaaaaacaaacgactatgaattcaacttcaaccatcgctcaccagaagacagagcaaaccgaaaatatagaatcgcgtattatcgaggcggcaaaacaagaatttataaaaaaaggattcgagcaaacatcgatgagcgatattgcagcggtcgtagggatcaaccgtcccaccctgcattattatttcaggacaaaagataaaatgtttcaagcagttttcgcctcgatcgttgcaaaatttttacctcatatcgatactattttttcgactcagcaatcgttctctgaaaaattagaagatgttatcgacgtctatgtatccattttctcgacaaatcctttgctccccaaattcatcataggcgaaattcaacgcgacgccaaccatttaatagaaactttttatagtttaaacctcgatcaatatttgaaacacatcggagaatttcttgaaaaagaaatggaaagcggaaactttaagaaagtacccctcccctttatattcatgacactttacagccaactggctttccctttcctcagtaagaaccttaccatgaaactctttttcaatgaagacaaagatacattcaatgcctttctacaagaatggaaacaacacattatctcgcaaatcacctatcttttgaaaccgtaaaagacaaaacgaaagggggtgtcgtaatgaatgatgcaccctctttgtacataaaaaagaaggggcgcattgtggcgtcccttctttcgtataatacaaaaccaagctattcggccgatgtagccaacggggcaggagtcgtataaacacgagccttcaactctttgtcgagcatatacaacccgaaaccgttatctttaatcattttcaagctatcgattaattcctgagcattagcctcttcttcaatttgctcgtcgacaaaccatttcagcatattggcagtaccgaaatctttttcctcatcggcaagcacacaaaggccatgaatcagggcggttacttttctctcatgagccaacgtatcttcaaaagcttcgagaggcgatttccattcggtcttcacaccggcaataggagccaacgttactttaccaccacacgagagcacatatttcataaatatagtagcatgagcttgttcctcttggaactgtatagaaaaccaattagcaaaaccttgatttccagccgctgcaaaatggttggacatcgaaagatataaataagccgaccaaaactcggcattcacttgggcattaagagcctcttccattttcttgctaagcataattctattgtttttatttattgttttacaaaaatataatataaaattagaataaatctaattttaatattttttatataaccgggctcttatttctataaaaacacgcccccgtcgaatcacttcgccggaggcgtaataccctatggcagtagggacttaactaataatttatcatatacttcttctcagagttcatttaacaatcttagtactatatccgccgcaacgcactatataaacgccagcgggataagcagacatgtcaatagctcccgatccttctacgagttgtttcatcacgagagtaccgctcatgttataaacagcagcctcgaccagctgagccgactctacacgaacagccccgttagaacggtcgtaataaactttcatctgagcagccacactttcttcaactgacgaaggctcggtcgaaacggtaagtttatcgagacaaaaatacgtcggcgtattgatgccataatcacccgtatcgctcgactccatcgtaaagtaaatcgaagcaatctgtcccaattcactcaaatcgacccattcccaagtatcgttcaatttccagtcgtcggcattctcagaacggtaatcggccaaataatattccacggttcctgtctctgtgccttgctcatcgataccgtgagcaactaatttaaaccaatctccctgctcgaatttagtcgaatagggattccccttctcaatagcataatagacataagggttgttgcatacataacaccctacggcataatatggagcggaagtgtatacctcgcaagttttcgtatcggaggtcgattcggtataggcatcccaatatgcacctaaatagggagttccctctccggcaaagcctcccttagccatacagccccattgatcatcggtacctgccgatgccgatatggcagttaccttgctggcaaagaatccatttgaataattggaataaggagaagcgtgcgaaaacataaattcttgtgaataaacaatcgcatcattattaaaaacatctgcccacaacccggactcatcatactcgataggaaagtctcctggattcgacaaatctaaaacgatgttttccgcaaaaaccgcactgcatacacaaacggcaaaaacaagtaatatttttctcatgtcaaaaaaaaatttaattagttaatatttattgtttgattattcgaatatactcagttctatcgtttgcacacaccgacaacacataaatacctgccggtaaagaagatacattcaaacgagacttcgacccgaccatcgtatcacgataaacagccacacctcgaagatcgaatacagtcaattctgcgccaacacaagctctcaccgtcagaatatccctgacaggattaggagaagctacgattttcaaactttctgcatcctcaattccactaacttcggttacatgcaccgaaaccatttttgtctctacccgcccattcgaattgaccgttaacgagaaactcgtatcgcccaatttctcaccggaaagaatcaaatcatatccctcgattcgggcagaaagaatagaggggtcttctaccttgactgtcgaaacgaccgccgcagaaagattatcggcatcggaaacactctctaatagcgaaatttttacaggagaactacccaccgacaaattatcggaaatcgagataaccggatattcattatcggggaataccggcatagccgggaaccaatagtatttctcaggaagtaacgtattcaacaactcgccattcgtcccgtccactatgtgaatccaattgttcatgtaatgggacagataacccgattccgtagaagttaccacgacattatcggtctgcgggtccactctcaaacccgcgccatagaacatctgcacatactccccgtcttgatcgggcaaagtaaaaaacgatgcattcaattcatcggtatctatattatagcgtacgactttatttttactttcatcggcaaaataaagcaggttagatttatatgctgcgcataaactcccggcattccatgctccccatgtatcggtgacccgacaaccggagggtaacgaccgagtccaagtttcgaacgaaaccggatttatcctaaccaacgcatttccatcggcagcccaaatatttccgtctcgccccaacacaagtgtcgcgatagacggaagttcgatagtagtttgtaaggtgtggttttcggcatcgatcaccaatacgccctccgattgcttcgcagcaaagacatatttaccggctcggaccatagaacctatctgacccgaataaagaccttcgtcattcgaggtcccttctatcacatcgccgaccttcatgttttcaatatcgaaaacaaaaattcccgatgaacttcctatatatcccgtcttctcatctacacccaaaaaggaacggccgtcaccgccgcctatttgatcaaaagccgctatcttttccaacgacaaggcatcggccacgaccagtcgcccccctgtcgattcttcttcggtcgacttcgcctgtttggaaatcaaaaagaatttttcaccgtaaatcgttccgaattgcgttgtgacacccaacttctcatcgggattctcccgacggaatatccggtacaccattcggccatcattcgtcaggaaattaatggttccattatcccagccataccaatcttcattgacaaaaaatatcccttgcgaataatcgacagcttcctgtatatatggctctaccgctacggcattagcataatccggtgtatcgctaccgggtttatcgtaataaaatatataggtatatcgattttgtatcggcattttattgatttcggtctcagcctcgtttccgctttcgcttcgggccaaacaatgccatactccatcttccgagaccgaaggagaattccaatggtcctctttgtcgacacactcccatttcttgaaattattcggagtcgctgtaaattgtcccgtagcattatacttaggataggtcgtatcgccgccgacaaccaatgcaacggtattctccccattcaggtcgaaacccaatccatcgaccgtgtaaccaccttgtcggcgcatcagagaaaacaaacgaggatccgttttcaccacatcgttcaacatttccacgattgtagtttcctcctcccctttatagccccacgccaacgctccgggcgttttcccgtcgttccaagcgatgactaacatggcttcgacattcccttctcctatccaataatttatatccgaaaaggaaacggcacgaaccgacatagaccaactgccgaaaaaagctaaaaaaagaagtaaatattttctcatctttctatttttttgggaagatgtcccggagccgaaactccggggacatcttcgttttactatttcacaatcatagacttatcgcctacaatcttctggttttacataaactttcgaaacttcgatcgaaccgtcctcatatacagttttcacaatattgataccttccacggggcaaggcaaaagtttcccgtccaccgaataatattcacgcaaacgcacctccttttcgacagccaggtcatcgataccggtagccgtcgttaccttgaacaatatgctaaactgtttatccgacgttgtcaataccaagtagtaataaggatcgttcggcaaatcttctccttcacgaattacggtcacttcgttaccggagtacgacacggtcaactcctgatcttcgacagggaatccgctacgtatcaacatggccgaaacactatcggtattaacgacagtccgattaaactctatcacgaaagttttcgtatcgggtttcacgtctaacgcttcctcgccatcgaaactcattgacggagtagtcgatactatttccaattcatctaaccacggcatgattacgaaatccttccaataggtggtctgggcatagaattgacaagtttgggcagggacataaatccggcaggttgtcggcactttggtaaatgtattggaacttgcaccggtcggcggtgtattgttaatatagatacgttccaaagaagaacaaccattaaacgtataagtggaaaccgaagctattttgccattggcaactactttctttaacttagcatcattgcgaaacaaactcgatcccaacgtagttatccctgttcccaaaacagcttctgtcaaactggaacagccatagaatgccgaagctcccaaagaggttactttatcagaaagatttaccgaagtaagacttgtacaaccgtaaaatgcattcgtcccgatagaagttatcgattcggtaaccggcaatgatttcaagcccttacaattataaaaagcagaattgccgatagaagtcactttttccgaaagttctacattaaccagattcgtacagccgtggaacatataattcggcacagaagtaacgccaccccctatttttgcagattccaatcccgtacaactttggaacacataagttcccagtttagtaacccgatcgggaatagctaccgatgttaatttcgtacagcttttgaaagcataatcttttatctcggtaatgcttgctgtcagcggcaactcggtaaaggccgtactttggaaagcatatttgccgatcccagtaatattctccggcagaactaccgacgtcaaagcggaacagctgctaaacatataatcgggaatagagcttatacctgtacccaaagtcgccgatgtcaacttcgtgcatttctcaaaggcataactaccgatcgaagttacactattcggaataacaagcgactctatcgcagagcaacccgaaaacacataattaccgagcgaagtaatcttatcgttcaaaggaatatcgaccaacgatgaacaacctttaaatgcgctcgccccgatttcggttaccgacggacaagatatctgcgttaacgcagaacatgtattaaacgtaaattcacttattttcgtcacacctgtcccgatagtcactgtttccaacgacttgcaaccgctaaatgcatagctgcccaattcggtcacgctattgggaatattcaacgtttgaaccgatacaccatagaaagccctgctgccgatcgactgcaagccatcgttaaaagttatggccgttaaaggattattataaaaagcccaatcacctatcgttctcaccgtagcaggcaaaacaagagaagaaattttcgcactggcaaacgcacgttctccaatagtttcgagagcacttccgaatgttacggattccaatttctcacaatcgctgaaagcataattaccgatagcggtcaaactatttcccaacgaaacggtggccaaagaagcacacttgttaaaggcatagttaccaagagtactcacaccgtcgggtaatacgaccgatttcacagcagtctcggcaaaagcataatcgccgattgttttcaaagaagaagatgaacgctcctgtgtacccaaagtcactgtcgccaaagcactgcaaccgtaaaaagcataattgccgagcgtttcgaccccattcggtatcgcaatttcagtcaaagcggaacagccgttaaaagcggcttcgccaatagccgaaacatttcctaacccgacagcattcaaagcagaacaaccggcaaatgtacgagtacccaccgaggataccgtaaccggcaattccaccgattgcaaagccgaacagccataaaaagccgaatcgcccaataaagtcaaagagttccccaaagcagccgaagccaacttcgtacaacccttgaaagccaaagcccctatcgattccatacctgccggcatacttacaccggtcaaagcgatacaattctcgaaggccgagcgacctatgctctccaatccttcacccaaagagagggttgccaaaagaggacaatcgccgaaaacctcattaccgatcgaaaccgtttgcgcaggcaactccacagatgtcaaacggctgcatccgtaaaatgccccttcgccgattgttttcaaagtcgaaggaaaaataaccgaagtcaatttagcacaccccataaaagccatatcgtcgataccgactaccgtgtaagattctccctctatcaggatagtttgggggatcgtcaaaatccccgaaaaagaggcatacgaatcgtcatacaccacgagggcagttcccggttcctctcccggggcggttactaccgatttatcgccgacaacgagcgtaaccgtatcggtagaaatcgtatcaagcatgttgctcaccacacaataataacgcccggcatcggaagtttccgccgaaacgatcgaataagacgacgcttcggcatcttgtatggctacttcgtctttgtaccattggaaatacaaactatcgcctttgaactcaggagcaaaagttaccgattctcccggagaaaccgtcaaatcttcgggttgaactttcacagaaggagctgtcggcccgtttttaggagccggcgcaagaggtttccacgattgaggcgacatgtttaccgaaaaattccaaccgtcccaacaaccgtcagtcaatttacggcccgtaattccagtcccggagtatccccagggatcgctatcgctcgatttcagccaataagaccaatacccttgataccagcccgattgccaatagtcctcgggatcggtacaggtccaaccgtcatatccatacgacgaagaaaagattatcccgttctcatcaggggaaagtgttactccgtccttagtaatagaaaaatcgccactcttgttaacatcgtacccaaaacccgatacagtgctaccatacgccgttcctgtttcggtcataatgaaaaaacgagggtcggaagcagcgattgcacgcgccatcgtttcgccggtagcttcaccgtcccaacgaaatccccaaaccaacgccgaggtttcactctcggcattccattgtacgacgaacgcagcgcgattggccccttcgccagaccagttttcgatcatgtccatcgtgaaagttccatcgacaatcgccctcggcgataccatctgcggctttgccgtagggtgcggacgaccttgcacaaggacttgtgcaggtaattgtaaaaccgcaaacagcaataccatcaaagcataaatctttctcatctttgttaaacttttaagtattaaataaatagttctttctcattcaatacttgcaagatacaccacttatatgcttccaaaactttcccgaacttcccggcgtttttttgtcacagctcatacctcgcaagcttttcggacaatacacacggcaggtcttctgacttactccggtaaccgatgccttcccaatcgtcataatcagtggctttcagtattctcgggacctttttgtggagcttacagcagcgggactgttcgggacttacacccgattcccttttaatcggcggacctttttcaagtagccgaacctgtgtgcactatatttttttagttattttcctctcgtttctttctattttttcatagtcattcttctatatgtaaatcggtaacacccattacttcggtcgaacattcgcccaaccaaccgttgaattggttcactcccgtataaatttttatgaaatcgacacccggtaaatcgaccggattaccttcgctatccaccgcccaatcgattttaaaattggacttttcgctactgttggggtgattatccgcataaccccaatcgtatgcgtaaaggacataataactcccgtttccactctcgtcgatagcgttatcggcaagcctgctccctttgaaagttatcgaactttccgaaatccattgtggataatacggttgcttatggaaagtgagttgcgatatatatcctgtatttccataattgtcggtccaccggacatacgtagaatccgtgatattcggattggaacaagtcaccggctccttgttttcatcgggtcgatagtaggttatctcataattcttcaaagtctcttttttataatattcgctaccggccaactcgtaccattcatcatcgggaacgccattcccgttcgtatcgaccgagaccatcactatcccgggttcgctactacctcccaacggggcatcgggacgaggattgtcattggcataaaatgcgttacccaatattttgaaatcgtattctcccggccgattgacaatcgtatggtcgaaaccgacgacaatatatccgccgtagcctcccaacgtgaccatcgtacgggcgtcgtatgccaaacaatcttcgactttctgccgcatagattcttcggtatctccctcggtatatctcggaagctcattgacaaactgtcccggtgcagggcgatattcataaaccttagttatgtaagggctataagctacctcttctttgcgaacgacaatacgcataagatgggttatgggattagccgcatcataaatctggaatcgcaaccgatacgttcccgtttcacttgctacaaacgtataatcgcgtgtcgtcgccacaatcgaatcggtgacagataccgaatcggactcgtaagaaagagcccattcgtatcgttctccggtaaaacccgggtgtaacgtcaagcccttcatgcgttccactacatacgtatcgtcaagccctaatgtaatcatagaaggattatcggactgacaagaggctatcagcaaaatcaaagccatcgacaaaacataccacactttcttcatatcggtttatttatttttatacaaaaaagccatgtgcgccggaatatccccggtacgaacgctccattttcttatcccgtcccgtccataacaatgcagatttccgctcgacacgtaattcttggcatccgttacataaacgtctccggtctcgggatttactttcaatccataagggatttctatatcggtttccgtaccgtccttaataaaactatttgaaatcaattccccggtacgaacatcgataataccgtaagtaacattattttcttgcgaaatattactccactccacgctatacagataaagcgaatcgccgcaaatatccatctcgctgcaagagacattcaaagtatctctcacctccatgcggtttgtacgcttatctttttccagaacgaaaagacgggaaggaatcttctcataatcaccccgagatgaaacccataatttcccgtatttatccgcccggatacgatgcaagttaattcctacgggaatctttcgtatctgcgtcatcgtttcgatatcgatcaccgaaaccgtattatcataattcggtttacgataaccgcctgaattagccacataaataaggccgtcttgaatgaccaactcatcgggttgataacccaccgttacttcggccgtaatttcgagagtagcggtatcgacttgaaagacagctccgagctgagcattcgggtctatccctaccggacctacataagccgaaacataagcaaaacctttatcgaaggcgatatatcggcaattaggtatgtccacttgtcccaatcgctgacaagaacgagcatcgaggacttcgaccttatgcgaacagttaataaccgcatacatcttggaaccatatatctggacatcgttacccacatcgcccaattcctttaccacgttaggattcttctcggcatacaagttacggacataatagccgttatcgaaatcgacgaaatcgagcgtacatttattcgaacccatattcccctcgttcaacaaataaagtccggcataatcagaccggctgttgtctccgagcggcaatcgttcatattccgccaagataatgacctcgtcttcccgacaggaagtcatcaacgatattcccgccagcaggatacacgaaacaatatgtgcgacaaccgatctcattacaattcaatggcaattccaaaacgatagttacgcatgggcataggataattaagaacgacgtcgtatgcctgatcaaacacattattaacctcggccgtcactttcaggttcaccgattttatccgaaacgatttcaccaaagatatatcgctcgtgtaccacggctgcacataattatattcgatattttcttgctgattgtaccgttcccccacatatacgaaactataattcaaactccaatcgtcatagctcaaattcaatatggccgatccgctatgccagggtatatacggaatctggtcgcgataatagttatcccgaggactggttatatctatcgcctcttgataggtgtattgcaccttcgtcattaaacttatttcatacggtaaacggaaagtcgccgtagcctgaacgtcgacaccccggatatcgactttaccgagattgagcatagtccaccggaactgctgtcctttgggataggcgataatcttgtcggaaacgaggttataataaacgtcggctcctgcatgaaaccccgaaaggaaacccgttttcggagcgacagcataagtaaatcccacattgtattgcgtagcgctttcgggcttcaataccgagttacccatatcggcatagtacaagtcattgaaggtgggcatacgatatatctgtttataaaaagcgcgaaacacccaattatattttttaaacggttgataagaaagaaataccgccggagtcactttacttttattaggcgctttcacctgtcccgatgccttctcatcgaccaaagtcgccaaaacactggcctgcattttcaaacggtcggcaagagaaaaagctgttgccgccgaaatccagtgcgtgtaccggtcggccgacatgtactccgacaaaccgttccactgcatgtcgtatgccaccgagacgtcccaatttctgaatatcgaatacttattggctaccgaaacataaacctctcgctgtttatactggttatcgactcgcatcagcttatcgtcgttattcatataatgggtataatcgaaagcatacttggcattcaccttaatcccatatttgcgggtaatatcctgttgatagacaccctgcacgaaagaattccggtcccacaaacgctctccgttgcgccacacgttattgacgatagcccccggaatcccccgctcggaactataatgataaacataggctttccaataaccgttgggcaagtaaccttgcaatcctccttcgaaccgaacggcatcgatgtctccgtttttacgggtagccgtggtatcgtatgccgtctctcccgaaggagtcacccgccggtaacggaatttatatttcccgctcgaattgatccactcgctattgaatgtcatgctgaccgtctcgctaagtttatattcaaacaaaaccgaaggattcagcaaatcgaatgacccggccttcacagatgctttcaaatgcgatttttctcccggtttaaatttagggcgacgtgtcgtcaaatagatagagcccgccgaaccgaactcccgagcagactggaatatctcgcttttttgaccgttatacaacgatatttcctctatattttcaagcgaaaacttgcccaaatccacttgtccgttctgagcatttcccaactgaattccattataataaacacccatgtggtttgtacccatgctgcgaatgttgacagttttcaatcctcccacgccaccgtagtccttaatttgcaaaccggaaaaataacgtatggcatcggcgaccgaaaaactattcaacgctttcagttcctttccggtgagcttctgcgaaggaatcacttcgttataccggttggcggtaaccattacctctcccaatgtctgtatcgagtcaagagaagaagaatcggcattcgcttgtcccacaccgcaaagcagcgacaccatcataccccacacacatcgataaaaagtcttcatcggcctatcctttcataaacagccttcgggtataatgcctaaaaatccatgcaaacaagcggctttatatttactccgcagattcacaagctctaccccacgaaagctaatgacaaacagcatggcaggtcttctgacttactccggtaaccgaggccttcccaatcgtcataatcagtggctttcagtattctcggaaccttttttggagttcacagcagcgggactgttcgggattcacacccgattcccttttcattctacaccctgaccggggctttgaaaccaatgcgttgcaaaggtaacataaattatcgactcctttctattttttattaaaaatattccaaaccaaacatacaatccaatcgttacttcaaaaaaatagaaatttattttatccgaaaaataatgtgtacaaatttgtattaatcataaattttaccgaatattgtgaacatattcgttgaagataatacgcatggaggaaaacaagattttgaaaaacaatagtatccctctgaaaatctggcgattttatatggaaggatttcgaaacatgaccttaggtaaaactctttgggcaattatcctcatcaagttgttcatcatgttttttatcttgcggttattctttttccccaatatcttgcaacagaaatacgataccgacgaggagagagccaaccaagtcatcgagaatctcattactccgaataatcctaaaaatcaacaatcataagtaaccatgaacgatcttttttcccttgtagattggtcgagagcacaattcgcactcaccgccatttaccactggctatttgttccccttacattgggactgggagtaatcgtgggtataatggaaaccatttattaccgtaccggcgacgaacggtggaaaacgattaccaagtattggatgacccttttcggagtcaattttgcaatcggagtagcaacgggtattatcctcgaatttcagttcggtacgaactggtcgaattatagctggttcgtaggcgatattttcggagctccccttgccatagaaggaattatggccttttttatggaagcgactttcatcgcagtcatgtttttcggctggaacaaagtcagcaaaagattccatttggcctctacatggctcacggcaataggcgctaccatatcggctctttggatattggtggccaattcatggatgcaataccctgtgggtatgaaattcgacccggaaactgcacgaaatgtcatggacgatttctgggcactggtactctcacccgtcgctgtcaacaaatttttccatgccgtctcgtccggctgggtattgggcggtatattcgtagtgggggtaagcgcttggtatctgattaaaaaccgggagaatttcttagcccgtaacagcattcgtgtgggagcatgggtaggattgataggcacgctcgtcgtagcctacacgggcgacgggtccgcttatcaggtcgcagacaagcagcctatgaaactggcggctatggaaggagtttacaacggtaaaaacggacaagaactcatcgctttcgggatactcaatcccgacaagaaatacgacaacgacgagaaagaatttcttttcgacatacccatacccaaactgttatccatcttggcgacccgggaaatcgacggattcgttcccggaatcaacgatattattaacggaggttacgtcgacaaaaatctgaaaggagaggaaatcatcgctctttccgcccaagaaaagatggagcgaggccgtttagccatcgcagctctcgccgacttcaacaccgccagaaaggacaacgacacagaggccatgaacgaagccaaagcaaggttagaggcaaactatgaatatttcggttacggatatatcgactcggtagaacagctcattccacatgtgccgttcgtattctattcgttccacatcatgattattttaggaggctatttcctcttgttctttattttcattttggtgttatcctataaagagaaattgcaaaagttgaaatgggtgctatggattgccgttctaacgattcctctcggatatgtctgcttggagtcaggctggatcgtagcggaaatgggacgccaaccgtgggtgatacaagatatcatgcctaccttcgcagcgatctctaacatcgaagtggcctcggtgcaaacgacattctggatgtttgccgtactgttcaccgtactgttgatcgccgaagtaggcatcatgttgaaacaaataaaaaaaggaaccgaacaaaaataaaaaactatggaactgaatgaattattttaccagaactactggtggtttcttatatcgctgttaggtgcgttattggtattcctgttgttcgtacaaggcggtcaatccctattggcagtcatgggtaaaaccgaaaccgagaaaagcatgatggtgaactccttaggccgcaaatgggaatttacattcaccaccctcgtcgtattcggaggagcgttcttcgcctcgtttcctctattttattcgactagtttcggcggagcctattggttatggatggccatactgttcagctttatcatacaagccgtatcatacgaataccgttcaaagagcgggaatttcctcgggaaaaagacctacgacacctttcttttaatcaatggtatcgtcggtcccgtattattaggtatagccgtaggctcgtttttcacaggatcggactttatcgtcgacaaagggaacttgacaaccataggctctccggttatcagcagttggacaaacgattggcacgggctggaagctattctcgatgtccgtaatctcttgctcggatttactgttctatttcttgcccgtacgcaaggagccttatatttcatgaacaatatcaagaacgacagcattttcgagaaatcccggaaacaagtattattcaacggcgttttattcgttattctcttcctgtcgttcgttacagcgactctgttggccgacggctatgaagtagctaccgattcgggtattatcgccgttcgtccctacaaatatttcttcaatttcgtggaaatgccgtgggttgccattctgtttttggcaggagtcgttttggtgttatacgcccttatccgttccgtattcggtcaacacttcacaaaaggaatctggttttcgggtataggaacgatcttagtagttctcagtctgtttttcattgccggatataaccatacggcttattatccctcgtccgtagacatgcaaagttcactgacgatttacaatagttcttccagcctgttcaccttgaaaaccatgagtatagtatcgttacttatcccatttgttctcgcctatatcgtttacgtctggcgagctatggatgccaagcctatcactgcccaagaaatggaaagcaacgaacacaaatattgacacttgcgtattcgcagaaaagagcttacttttgttcttaaagtaagctctttttttatggacgatacctacctcaccatatcgcgcacatcggaaggaatttataaagaaaagatgagtaaattccttgcattcgccataccggtttcatcggtggaagacgtcaaaaagcaactcgaaaaatatcaaaaggagtattacgatgctcgtcatgtctgctgggcatatatgctagggccccaacgaaccgattttcgctcgaacgataacggagaaccttcgggaacggccggaaaacctatcctcggacaaatcaattcggcgggactaaccgatattctcattgtcgtcgtccgatacttcggtggaataaaattaggcacgagcggactaatcgtcgcctatcgcgaagccgcctccgaagccattgccgcaaacgaaataatcgaacggcaagtcgaagacgaggtacatttcggattcgaataccctctgatgaacgaagttatgcgtatcgtcaaggaagaaggacccaccatcgtatctcaaatattcgatatggattgcgagatgaccctacgcatacgccgttcgctgatggacaatttaaaaaaacgtttatccaaagtagacggagttcattttataaatgaagaataaacaaatatgacagaaaaagagaaaatggaaaagggggaattgtatgatgccgcaatccccgaactaatcgaacaattgctatctacccgagataaaatttttgaactcaatcatctgaggccctctcaattagaagaaagagaaaaactcattcgggaaatcattggtactacacccgaaaaattcataatcatatcgcctttcttttgcgactatgggcataacattcacttgggcaaaaatttctttgccaactacaattgcgttatgctcgacgaggctcccatcaccataggcgacaacgtgttcatcgcccccaacgtgagcttctatacggcaggtcacccctccgatgtcgagcgacgaaacgaatggctcgaatacgcatggcctattacggtcgggaataacgtatggatctgcggaggagttaccatcactccgggtgtaaccataggagacaatagtatcattgctgccgggagtgtcgtcacaaacgatattccgtccaacgtcatcgccggaggaaatccttgtcgggttatacgcaccataaccgagaaagacaagctccggtcattcagttgggaagaaaaaaaagccaaaaaacaagttaaacccgcatgacggaaactcattcgtcttgcccctcgtaccgattattatcgctccactttaattgaaacgaaggacggagcgataatatccacggctggtcagtttcaaaatcgaaatccgtcctattcatataaataggacaaggaatatcgagcttgtctttcatttccgtatcggggaataatttatatggaatcgaacgccgttccaatttatcgagaaacgagtagttccgggtatacagcttcgcctctcccggcgaagactccatcttttccaacacataatctatcgtttccttatacacgatattcttgaccgctaagccagacaaacagataaaaatgtcggcagaaagcaatgaaagaatcagtatatgcaatccacgggagaaacgggttttcaacccgaaccgttcggcataaaacagcataacgaacgggaatagatagaaaaaggcgacatatcgagcccaccaccccgacggaagaataaccaatgagacgagcaacccgacaagaaccgacagataccaacgcatacgacgaatatgccccgtacaaacgaacaaaacgatagacaacaaaatcgcttcgaaaaagaatataccgaatcctccgattcgaacatcagatgcgaccgatgataatatgtcgattttagaaatcccgaacacatgtatgtcttcggacagcatatcgtcggaaggattagaagccaccgatattaaagccgcctcggcattagatttccctcgtatcgccggcaatacttgacaatccataatatcgactttaccattccccgaaagaggataaacaggagaaccgtgctctttccaattagtcagatagggattgtatgcaccaacaccaatccctaacaaaacaacgaccgcacataccgcagtcaatcgaaaggaatgtttataacggctctttctcaacaatgcaaagaaacagattcctccccacaacacgacccaaaagaaaatattgaattttatcgccggaataaagaacaataacaataaatcgatatgcaaagtcctttgtatccctttcacaaaaaagagatacatgttaataaggaaaataaccaaaagcgtataaagggtccaatctatataataggtacacatctgattaatcacgaccggattgagagcaaccaccaaagcaatccatatgcgtaaatatttattcatcgtcggcaaacaataacataagaataaatagatatatactatggaagaaaatacgaaccataaattcaatgctttaccggcatccagattccccatacaggaaacaatcgtagctgcgattgtttctattcctcttggataatgctctacccataaaacagtatatccatcgataggagtaaggctgcacgcaaaagaatagatcggattccacccgttcaccaactcccgaatcgtacaagcatgataccattgaccgtcgaacgaccgatcgtaaatacaagcggataacccaagagtaaccgacagtacgacaagcacggcaacagtcgtggtccacctcacgcatccccggattctcctatcggaacactcccataaaaccgatatacatacagcaatcggaaaaataaaactatttatttgcaaacctacccataaagatagcacggccagcacataactgaccaaaggtatcgcaatcaagagccgggcgaaagactccatcgaagcggttttatccgttgaaaaacagtgaaagaatttcatctttatggattctggcaatcggtcataaaatttgttttatttcagaaagggaagtagcggtataatcgggtcgggctccgggaataacgagattatccctgttaaaataaatagtcttccagccggcattcatggctcccaatatatcggcatcgtaattatcgccgacaatcaatgtttccgaagcctctgcccccacaatctgcaaagcatagtcgaacaaacgccggtcgggtttggtaatacctatttcatcggaaagaatcaatcgtttgaaataatgagaaataccacccgactccaatttacgggattgaacctcggcaaaaccgttgctcaatatatacaagggatagcctctttccgtaagataatccaacaattcgaccgctcccggaaccaatgtattctgctgggacaatacatcgaggtagcgatcgttcaaggccatgataaactccttatcctcggacattttactacctgcatgccgaagcggacgagaaaaccgctcgactatcaaataatctttcgttatccgattgtgatgatacaactcccacaattcgtgattcgtcgccatatacaacgacttgaatcggtcataatcgggaatctcttttttcaatgcaaactcatcgtaaacttgccgcaaagacaacacggaatttgccttgaaatcccatattgtatcgtccaaatcgataaatagaaccttacatagcaattcagacatacgtttattatttggcacaaagataacgcaaacaaaagccgaaacaaaaaaatttgtttcggctcacaaaatttattttcacacctctatacacagatattcaaactcttcacatgaatcgatattttcatacggtatcacattcagtctttctctacaatagccaatccattcccgacagctctgggagaaccatcggaaggacgattacgaacaataaacgaagccttcgccttttcatcttcgtcccgcaaaaccattgtcgaggaacctcccccgtcataattcacggcatcatagctacctattccccacataaaatcggccaattcgtaaatatccaaaccctcggcataattcgttcgccggccatctaccaccacgacgtacaacgtttgtttgtcttccgacagtcctattgccgtacgggggtgtgtatcgcacaaatatgtacctatactgctgatcccgtcattaaatacacctcgtttaatcaaacagcccaaaccgcccaatgcttgataaatatcggctttatgtttgataacattgctggcaatatcgatatccacctttccgtcttttgtcatatagaccgtaaattcatgattgggatcttgccaccaatcgctcaacggatatccgtctttccaaaaaagatgtttcggtttaattaaagtcgtttcacctttcgagtctttttcatacacccaaaaaccaccgttcacggcaacatgcacccggcgtcccgaattttcgagatacttcgtctgttcgggaatcgtattgacttttgtcggcatggtattcacttcaccgaacggtgtagtcgtcgcaatagtcaatttattcacgtcgacttccgccacataagcatgctggcgagccttagccgtatgaaaatcaatctcggaaaataccaatcccggataccgctcctctgtcgtcacccggtttactttcaccaccaaatcggtacgactcaatattttcttcaccaagaccgaagtcgtatcggtcgtaaccgggaacgaaggggtattatcaccctctttcgaaggttcgtctttcgatccgcaagctacaaaaccgaatatcaaacctatcaataaaagtttgctccaataatctctgcctaactttatcataatatacttcaattaattatttttcaacactttggtaaattctataccacccgacctatcgttggtttccaccatataaacaccggctggcaaaatcgacacatcgacagggcgacccgaaaccgcctctcctttcatttgcaaactccccgacagattatatattgtatatccaactgtaaaactatcagaaataacataaaggttatcttccgaaacaaaaactcttatcgaattctgttgtacattaggttccatgcccgactctccggtatattcataagcacctatcatagagccggtcgtattgcgtattacgcctctcccatcgacagccagattatccgtataaactccattatcgtttatgtcgatatagaaagtagattccctcagagcagcaacactcaatacattcaggttattatttccgcatgcaacggacttcacttttacagtaggtgcaaatcccccattatcggataacagcaaggataattttccatcgacgatttcactatccaacactttctgcaaatcctgtacacaacggtcataattgcgacataccatatcggtagattttgccgtaatattcattctatctgctccaccatacaaattatatgtagagttttgcaaggaggccgactcgcccaaatagacttcccccgcagtggcagccgaagaaaaattaccggcgattatgttatttaccaatctcacctttcccgaaatcacatgtacggcagaaccgttgaaattgaccgaaggaacgccgctcgtcgtataacacgaatcggtattgccgacaatcgtattattcaccaaattcaaacttcccgaccccgacttaaaataaatagcgctacctccattggttttatcggaaagcgaactgcttttcgcagtcaaccgattattgacgaatgtattattgacaaatgtacttaccatatactccgactcgcccatctgcgtataaaccccgttccgactactgacattatcggctatcgtattccccgacaacaaggaaaaaatcacaccgtccgaatatcccgaactaccctgtgtcgctcgattctgcacgaaataggaatcagatatatgcgaccgccaacccggagaagccaaataaaatgctccaccctgagaaccggattgatttcgagcaaacatcgtccgatttatattcaaatttcccccggaatatatagcacctccatacgccaaagcataattatcacacaactccacatctttcaaaatgaggtctattcctttcgaataaatagcggctccgctattgaagcctgtcacatcggcatatcccccggtcaacttcaaaccgtcgagttccacaaaacaagaatcggcaacggtcattatatgatagacattatcctccgcgcccgatgcaatacgacccgactcatcggtcacatcgttccggttcaaatctcccgataattccgttttcccgactaccgaagagaaactctcgtcatatccgccatgaatacgaacgctcttatacacgtttaccgtcgcttgccgacctgcatgcgacgatgtttccaccggatagaaaacacctcctgtcataaaaatagtatcgtgtttcgaagcgacatcgatagcctcctgcaaattattgaacggggcgtttttcgaaccatcgggaacagccgacggagtcgtgctcacataccacttgccccgctccaaattatctttaaatgtgcaagtaatcaaaatgggtaaatgatcggaaggcgtaattcctctcccgaagtcttctgtaatcgtctcgtaagaaagcacattcacccgatcgcaaaacacatagtctatgggctctccacccgtaacggcaggattccactgtgcaaacgtagtacccggtccaaccggagccgtctgcgtcaccttgcgactatcgtctaaataagcgttgaatgtgttatacatcgctttctccgcataataggcattgaagtcacccacgataatagcgggataaccgtctgctatttcctgcattttctgcacattgatccgcgccccttcggcacgtgcaagtacgcccttatggtcgaggtgcgtggagaaatagaaaaatacatcgccggtcgtcttgtcctgtaatttcacccacacggtattccggcgtaccgccgtatcccacgacaaatccggagccgcagggttcgatgtcaagaaatattgacccttatccagcaaagtaaacttcccggccttgtatacgatagtcgtatgcgtaccgctcgtctcggaaatcgctccccaagaatgagtcgcataatcgtcgcccaacaattcctccaattgaggcaacatcttgatgctattctcttgcaagcccaccacatcgaaatcatgctccacaatatttctaaccacatattctttccgcacattccaatctttatctcccgtatcggccgcattctcccctcggatattatacgaccccattctatacacaggcgaagccgaaagcccggctatcatgccaaagaataccaccgataataaaaatctgcttttcatattcaaaataactatctgtttatccatattttttgcgagaacactttgccttcggtcactatcctcactatatacatacctattcccggagccgatatatgattgctgttttcggtcaaagagatcaaacaccccgaaacattatacaactcgacccgatcaaccgccttacccagcaatatcgtccgccccaatacagacaaatccaaagacttaccttctatcgtctgaacgtccaaagcattttcattataataattataaaccaattccacggccggaatatctatccgataattttgccccaacgtatttatatccatacccaatgtaaaatgcgagagcaccaatggataattcgctatatcgaaaacatcgcccaaaacatcggggaaagctatatcgcatatattctctttattcgcttcgggaatcggtaaatcgactgcgactgtctttttcgacggaagtttcaatgtacaagaaaacgtcttaaccttcacttctcccggatttatatgaatccgtaatgtatcgggcagactatacagaggaatatcccctgccaaagaaatcgttttcgccgaagtactgttatataaaaacgatatttgtaacccctctttctcggaattagttaccgacgtatttttaaacccggccgaggttgtgaaagaaactttcagccaatcgggagttccgtcatttatattcaatacatgtttcgagggctcctgcactttcactttcagagtatccgacactcctgatatagagccacatatctcggccattccgttttgcaagcctttcaaaacaccattctccacaaaagctacatgctcgtccgaactgctccacgaaagcgcactcggattaagaggcactacctcgccggtacttttcgtcatcgacacttccaccggatactcataatgacaatcgctcacaaccgaatccaatctgaaaacgatattatctatatcctctttcaccacgacctccatttcacaagtatatccggccggtgtacgagcataaattttacccaaacctataccgtcggcaacaaaagtcttaccatcggcttttacatatcctatccgttcgtcacaagtaatcgtataattagacacttccgtatttatcaacagtccataggcattatacccgtaaacagtcggactatattcctctcctttggatatgacatgcggaggtgtcgcaaaatctattcccccgacaaacgaagatgcaggtgctgtggaaaccacgaatacaccatcgccgaccttacgctgcacacctttcgaactgggatagttccttacccccaacatactggtatacaatgtgctcgaacctcctccatctaaattcagtgcttcatcggctccggcatatcgcatcaagtcggctaattcccgggtacgaacgcctcgcgaaatttcggtacgaccatcgcagaccaacataatcaatttcttcttatccttactgtacccaattgaagtacggggatgccactctatggcatcagctcgctccccttccgtattcaatacctccccgtttcccaatatcttgggattaccggtagtcagatgctccaccataacggtctcgccatcaaacgacatcggtaaattcacctctacttcgtccccatcattcaaactttgaataaaaggccctgccaagccttttccgctaattacgtacccaccgtcgggaatcaccatattggttcctctcgcccatgcacctttcacggtcatcttacaaggcttcccgggaactaagcgttctcctgctttcggcatcaatgcgacctcataatacatcgggaaagaactgcctgtcacctgcgtcacttgccccggcattttatcggtatagagaataattttattgtttccggcattaacatttactcccgatattgcatatgaatcggtagccgtagtaatcgtcccggcaaaatcgaccgaaacattgctaaggtacggtactttatcggacgtaattccaaaatgacggcatatcgccgatgtagatgtcctataaatttcaccttcggcgaccgacgcatgatgcggcctaccgacaatactggtttttccgtcgttcgcagtccccgacatcgcaaaaaaaccaccgttgattcccgcaaaataaagactttcgccctccacactatgactttccgccatctgtgtaacagtttgagcaccggctaaatgatccgtagcgcacactgttcttatatccacataaggatcggtaagatctaccgtcaaataaaaaaccgtcaatgtcgtatcgggccccgtcaataacaacgaagtctgcgtagtcccgggacctattttagcatgaaatgtagtatctacccgatagtccgtattccaaactttccacgtaacggaagcgtatgaattgcataccgttaaccataaaaccagccataaataaattttcaatttcatagtacgacatcaaacttattattaagaaaaaaggtaatgagaatgtgaaaatatgctgccggaaagaactccggcagcataccagatgaaaaaactacttaattgagatgttatttaatcactttgaatgcctgtccacccacagtcataatataaactcccttagcagcagaggacaaatcgattacttcattagccggtacaactttcacgacattaccgctcaaattgtaaaccgtcacgtcggtatctgccccattcacttggaatataccgttacccaacgtgcttaccgaaaccttgctaacattcgtcaagcctgtaatacccgatgtagcatcaccgtcataagctcccacacaagtagtagcagcgcgtttgtaaccgcgttgatcgacggtcaaatcgatattctccggcaaactccattcggtttttaaagcgttcagttcatcgagagtcaaactcaacatacgggtagccggaaccagcgtttgtgtatttcccccattatcaccgaaagtagtctctccgaatacatcggcataggtatatgtttccttgtcgttgccactcagatacaaaagtgatgtcgcttgaatttcgggagtttgcgtacgatccctcggagtagcccaagtggtacaataccatgccgtacccgaaatattataaccgccactgttccatgtgcccggacgagtagcactattacggctcaataatatagcaggattagaaggtgcggattcgcctaaaacagcattcacaatataattattcgccatataattgtatccgccatagctcattacccccaaaccgcgacctacatcctttgtagtattgttattaccagcaaccgtacgagcttcttgttcagcggtataatctttattagcaattgtattggaaatcatatacatcgtcgttccgggatagcccattacaacaccgaatccttcggtatagttatcggcaaccaaactgttcaccaaatagaggcggacacgctcgtcactgctacccaaaaagatcgccgatccgcgaagtttattggtataagccggtttaccgtcttcaccacattcagattcaggataatagtcggtcgtaaaataattatcggtaaactgacagcgttgaaccacggcttgcgtcaaatattcatctcctgcataagtcgagcttgtaaacaatcctaaggcagtacccttctcactagaaaagttttctgaaaagacacaatcagagacatttgcatcagaagcaataagtgtcaaaccagatgttccgataaaggcggctccattttgaataaagttacaccattgcatatccaaatcggtattgaataccatcaccgcccctttataattactggcgctatcgtagttgcggaaagcgtgtttgaatgtgaatccttttacggtaatattcaatctcgttttcgtatccaccccgtctatttcctcacgtctctgcatataccacaagtgagtacggttaccgggaacagctgctacatcgctctcgatagcccctgaaatgacagtttcataaggagaaggatacgtaatatctgtattcgtacccgtactgacagggtcaaaaccgcccaaaagagtcacacttcgattaatagctaaatatttgtcgaaatcgggagaggacaatttatacactccaccggcaaaacaaaagacatcgccatcggcgaaattcccttgttccatattctcggcaaaatagtcataactaatcgcttgttcccacgacgaaccgtccgtgtcgtcagaaccgtcaacttttataaaatacgtcgtggcaaacgcactgggtgctgtcgccaacataaaccctgcaacaagcaggcaagaagtcaattttcttttcataactacttttttagattagattattggtaaatatttaattttagcgaggagaatagagatagtcacctccattctccccaaaatagtttaataagacaagccgtcttcccaacccgggttttgagtcaagttatggttcaatacacgttcttcggtcggtatcggccacagataatcacgttcctcattccaagtccgtttcacatctttgtgaggccacatatatccttcggtatcattggtcaggaagaaatccacacccaatttgtatttggtcaatcccaaacccgacggagcctgatccttgtaaatagctgtttccatctttccgtctccgttcaagtcgtacttaccttctccggggaaatagaccccatgatactcgttggtaagctgtttaccctctttccaacgaattatatcgaacaaacggaaaccttcgagacaaagctctaccgtgcgttcgcgacgtatttccaatatcacaccggtcatcgcacttttcgtcacattgggataaccggtcacatcggccatcaaataaagatcaggattggcattcgcctcgtccatatcgatatgagcatcttccattcctgcccgatcacgtaacagattgaccgaaatatctaaatcgtcctgcgtcaacgttcccaattcagccttagcttcggcgtagttcagataaacttccgccaaacggaacaacgggaaatacatcggcgatttgttggattggtcgtattttggttccatcacatatttgatatattgataaccggtcaacgtatatttagacaaggtattgatcatctccttcgtcgtgcctttctgtacgtaaccgggagtcagaatcgtctgagacaaacggggatcgcgaccggtcacttcggctacgaactcattcttttcatgcccgggcttatcggtataacgagaaccgtcggccatcaaataatgatctacgaaacgtttggtgaatgacacccgttgattacctgccatcgaattgcactgagaattatgcaagatagaaagctctgtactgtaacgacgacccaagatgatttcctcggcaggagcatcgagacgagcgaacaaatcgcgatatggagtagaacctgtcttataaagcgagaatcctcctttttgaatcaattccaacgaagcggctgccgattgttgcagcatttcttcccaatcgcccaaattgtgatatttacggaacgttccttcgaacaatgtagcgcgggatttcaatgccaaagccgtccatttgttcacttcatacggagtcttcgtctcgggcaacatgtatatagcactatccaaatcttccacaaccttctgcatcacatatttacgagaatcacggggtttatacaacagttcttcatctttcgatccgattacttcgtcgtaataaggcacatcgccgtaacgttgtactttcgtgaaatagaagtaagcacgcataaagtatgaaaaaccgtcataatgtctacgtgcattttggtctttacaagccccgctattctcaaaataataattgatcacacgcaaatcgtcccaatcccaagctttctcggtagatggataacggttacccaaaatctcgttatccaagatatttttgatgacatcgtcagcacagatgtcattcaaatcatcggcgccgggaagcatgccataataggcattggtgtattgacgtagctcctcttcgctggaaaaataattttcgggagccatcgtatcctctggaatcaagtccaaatcggtacaacccatcaaagcagctccggtcaacgtacagaatatatataaatactttttcattgtcgttctgtttttaatcgttaaaatgtaatatccacacccaccgagaaatttctcgaatagttgtaagccataccggtattgccgtttcctccggcagcttcgggatcgatgtatttggtatgtttcaacatcggcgaccagtaccaaagattttcaccggtaaaatagacacgcaatttggtaaagacctttttcaaaaccggcaatgtataacccactgtgagattctttaaccggatatacgatgcatcttgcaaatagcggtcattattcactcctaattgactgccagcaaaagtctggtaaccacggaaacggggaaaatatccgtcacgattctcttcggaccagcattgatccataaagttctcgggaataaaactcgtgaatgcccgggaataaggtccccagaaaccggtagaaagataattgggataccaatctctcttacctaccccctgaaagaagatacctaaatcgaaaccgttccagtcggctcccaaacggaagctatacatataacgaggtgtctcgttaccgataatctctctatcgcctgcatcatacgccgtatcatcacccttagaaataacattgtccccgtccaaatcacggaatttcaaatctcctgcgcgataataaggatctaccttatcggtcaaaatacgttcatttacagcatcttgattgattttcgatgtatattcggcggcctcctcgtccgaagcaaacaaaccgtctacccgatatccccaaatttcacccaatactttaccttcataatggttagacaaatttttctcaggattattgaatttggtaaataccgtcttgttatcgcccaaagtagccgataccgtataattaaagcgtttgcccatcaaagcgaacgaatcgttccagcctaaataaagttcccaaccgttagtacgtaaatccgcacaattttcgtccggtgtcttagctccgaatactccgggcaactcatacgaatcggccaacataccttcggtattacgaataaaatagtcgcctgtgaaagtcaatcggttattgaggaacgacatatccaaacctatattccacgtagcgatcgtctcccatgtaagataactggtctttggatcggaaggtttggaatattgtaatttagaagttccatcaagcgtataattaagggtttgtcccgtcactatttcctccaaataggcataagtatcgccggtattctgattacccaatttaccgtaagaaagacgtattttcgtattatccactacgtctctgataggttcccaaaaattctcttcactgatacgccaaccggcggaagcagaaggtacgaacacccaacggtgatcgctacggaaacgggaagtgccatcgtaacgggcactcacttccaacagataacgactcttataatcgtagttcacccgaccgaaaaagccgctgttacgccattccgaaattgtctgactacgggttatatcacccgtcgcattggcaaagctcgacaaattctcgctcaatagtgccaactgttgcaaacttaaataggtattgcgggctccacgatattgataaccggccaaagccgtaaaattatgcgccttgttccacgtgtgggtataggttccatacacattcaaattgtgctcgttatcctcgtaatggttctccctgtaataatccttgaagttaccggtaacaattgttttttcctcaccctgcttattggaatagtgcaaattatggttccgaactttattcaatcgcccacgatacttataactataatctaccgtcaacaccaaatccttaaaaatatcaatatcaaaacggtttcctataattatatacttttgattgttagcatggcgcgcgcgattgtcaaccaaatagggaggggttccattaatggtagtattggcatgcgtctcggcataaatagccttaccttcgggagtcttggcaggccatgatgacatcaaggttttatccacctccatcaacgtattgtctatggccggcaatccgctgtacttataagaagatgaaaagaaattcacattggtcgaatagcgcaaccacggtttaatcttcacatcgagtttcgctcttgtagaataagtgtcataagtatcgggattgatatttaaaataccctcttcacggttgtaacgaccgctcacataatacttcactttatcgtttccaccggttaccgaaagattatattcctgttggggacgagttttacggaacagatagttgtaccagtcgaaattggcataatagcgatatgatccgtcgtcctgcaaaacgatccacggacgatcgggatgctcagtcttgtcattgcgacgctcatacagcatttgcatttcctcttcggtatagttggtaaaattggtcgcatattgcgaataataagccttatcgaccaaacttacctgatcgtagcccgtagtcatataatcggtcgaagtcgtattttgcgaccaaccgaaacgtccgttaaaattcacactagcctttccagcagaatcggagccggtcttagtggtaatcaaaatcacacccttcgaagccgtcgcaccgtaaatagaagcagccgaagcatctttcaaaatagataccgactcgatatcgttgggattgaccatattcaactcggtcactactccatcgaccataatcagtggtgtgtttgatgtcgatatagacgattcaccacgaatattcaaatcatatccaccgctggaacgaccggaagacatcttcaaattcatcgaaggatcggctccctgcaacgccatggcaacgttacttaccggacgagcattgatttctttggcactgatggttcccacagctccggtcaaattgacttttttctgcgtaccataccccactacaaccacttcattcagtaattgattggcttcttttaatttaaccagaacaaagttttttccatttacaggaatactttgtttttcataaccgacatacgaaacctccaacgttgcattagcaggtatgtctttcatagtaaaagcaccgtcggcatcggtcgaacgaccgatagaggtacccgaaactttaacaacagccccgataatcggttggtcatattcatctaagaccctaccagtcaactgattgctggctcccacggactgtgcgaacatctggaaaccagacataaaggcgataatcaagagtaaacaagaccatctcctgtgcagtgtgttcgttagtaaattcataatttttttgatttatggttcttattaaattagaagtttctatatattattataaggaatgaaaaattcattcctttaacaagctatcttttaactatttacaaacgattctccttacaaaacaacattaacacaacagttacggcacaagcggatagcaacagaataaagcctccgtcccaaccgaaatgctcgaaaatatatcccataccgatattggcaaacacggccgatcccagcaaatagccgaacaaccccgtgaaaccggcagccgtaccagccgcttttttaggaaccaaatccaaagccgagactcctatcaacattaccggaccgtaaatgagaaatcctatcgcagccatagctacgttggttaccatcgccgaagcactattccaataaatataaaccgccagcataaccagcaacatataaataatagtcaccggaccacgacggcctttaaaaactttatcggaaagccaaccacaaagtatagttccgaaaataccggctatttcgaacgcaaaatacgaccaactgctattcgccaaatccatgtgcttcacctgttcgagatacatcggcgcccaatctaacacaccataacgtacaaaatagataaacgcattggcaaaagcgataatccacaaaagcttattattgaaaacatgtccgaacagaatttctttggtagagagttccttttcctgttcggcggaatatgcctgagtacactcttccggcttatacagttcgataggcggtaatccacaggattgaggcgtatcacgcaccagtaaataggcaattaccgcaatgattacggcaaccatagccgggaaatagaaagctccgccccagactccgaaaatggtaataccgaaaaccgccaaaggagccataagagctccaccgacattatgagcgatattccatatagacatctttacgcctcgttcccggacagaaaaccagtgaaccatcacccggccacacggaggccaacccataccttgcacccaaccatttacaaataagatgcagaacataagcatgatagaaagcgaactgaccgtccacgggataagacccataacagtcataatcactgccgaagctatcaatcccaaaggtatgaacacacgagcattgctatggtcggaaactgtacccatcacgaacttactgataccataagctatcgaaacggcagacaaagcccaacctaaatcggccttatcgaaacccatctgttcgagtgcaggcatggcaatcgaaaaatttttacgtaccagataataacctgcatacccgataaatataccgagaaagacctgtaatcttaacttcttatactccttgtccacccgttctttgggaagcggatcgataaccggagccggttggaataacttcaacatacaatatcctctctctaaaaaatcaggctaaaatataattttttgccagattggtaaaatttttaacttgttccgtttcccaatttttatcttttcccatttcacgagccataatagccgctacacgaggagccatttccatagcagcccgagcatccataaagagcgctcgaacacgtcgtgccaatacatcttccaccgtttgagccatctcctcccgcacagcccaaataacatgagctacccggaaagtatatccgatatgaagcaactctcccaacgaggcatcgttttctatcaatgctgcgatttggtcggcatcgctaccgtacacgtaatcccaaaccgaacggtccacttcttcccggtaaccatgtaattgcattttacgagtcacacaagccctcggttccaaaccgatcaaagcagctactttattcaccgcttcttcggccatttgacgataagtggtccatttccctccggttatcgtaagcattcccgaatcggaaacatatattttatgattccgtgaaatttctttggtctttttggaatcgctatgcgtaggagctgccaacggccgcaatccggcgaacacagacaatacatcgctgcgtttcggtttacgagtcaggtactgccccgcctgatcgagaataaaatctatctcctcgtccagaggcttcggttctaatgaattttcattcaatggcgtatcggtagttcccaatacggcctttccatgccacggtacaccgaacaatactcgtccatcccttgtcttcggtatcatcaaagccgaatttcctcccaagaaagcggcatcgactacaatatgcactccctgactgggacgtactttcttgcgactctccggcttatccatttgcatgatatcgtccacataaacaccggtagcgttcactaccccttttacatttacttcatacgttccgccttcgagagtatcttccaaagccgccccgcaaatcttcccggaatcattcttaatcaaagacgttactttcatataattgatgcatatcgcaccgtggtcatgagcactctgcatcaatgtaatcgccattctcgaatcgtcgaattgcccgtcgtggtaaaccacgcctccacgcaaatgatcgtgcagcagtcccggcagctccttcaaggtctgtttcttggacaaaggcaaagacctccccaagcccaatcgcccggccaacaaatcgtaacaacacaacccgatggtataaaaaggacgttcccaccaacgatagttgccgataatgaaacgcatatcctttaccaaatggggggcattgcgccataagcgaccacgctcatgcaacgcttccacaaccatagatacatcgccttgttgcaaataacgaacccctccatgtaccagcttcgtgcttcgactcgaagtcgcttttgcaaaatcgtgttgttctaccaataggacacggtatccccggctcgaagcatccaccgccacgcccaagcccgtagcaccgccacctattatcaataaatcccatggtctcttttcttcggccatctgttttatcaagccttcacgtttcattttcttatctttcgatttttgatttcttattaaatcttgcgattactttctttttatgtgacaaagaaaataaaaaagcaagtataaaccaagaaaaaatgtaaaaatttttcgtttcgttttcttttcaataatatttcatttcgttttcaaaataaattctcaatattatttgtgcattattcaaataaattttacatttgtatggaacaaatattataatattattatgcttagtatagccgaaagacacaaacacattcttgacaagctcaatgcgcaaggattcgtgaaagttttagatatcgcccgcgaattggacgtgacacctgtaacgatacgaaaagacttgaaattactggaagaaaagaaattgctatttcgtacacatggaagcgccagtccggtaaaccctcacacggcagatatcaatatacatattaaagagcgaataaacagcgatgccaaacggcgtatcgcccatacagccattcgtctactcgatccgaacgactcgattatcgtcgcctcgggaagcacagtgtatgcattcgccgaagaaattacagacgatctaaacctgacagtcgtcacggcttcgctcaatgtctctactttgctcaaccgtttcgagcacattcatgtgatccagctcggcggaacattgcgaaaaagttctttctcggtcatcggcgatttagctgcacaggcattcgacaatcttacttgttccaaactatttatgggagtagacggtatagacctcgatttcgggctgacgacctcgaacatagacgaagcccggctcaaccaacgtatgatcgcagcctcgctacgaacgatcgtccttgccgactcttccaaattcgggaaaagaggattcgggaaaatctgcacactcgaccaagtcgatgtcatcatcaccgactcgggtatttcgccatcggtagcgaaaagcatagaggaagcaggaatagaactaatcattgcataaacctcaaatcgaaagggaacaaaaggggcgggaatgttattcccgccccttttgtttatctccgaatcttaaattccatattaacaaagaaaagacctgcttcacacgacgcaagcaggtctttcaccaacgataagtgtcgccaactcaaaagctatttcactaccactttccccttaattaaactgcttccttcgatacgtatcatataaactcccgattcgagttcaaattcctcactttccccataggctttgcggctcgctctctgacgcccgagcgtatcgtaaatacctatactttcgccaccttgtaaattaacgattcgcaattgtcgttttcccggagaatagaatgtaggctgctgcatttcatcggaaaaagttttaaaggatagagagaaacgtcccgtttccatcgctcgatcatctaccgtaaaactatacggcgcatgtttcaagtccactttccgccccgtcgatctatcggtaagaaccacagcatcataacgatcatattccgaatcttcggtcaacgatatttcataaattcccgattcgccggtatagatacccaccggagtttccccttcgatatcggcagtttgagtatgagcaaatcggactcccttttcattgtagacataaatctgcggaatcctcgggtcgaaactcatcattttcaacgcatcgtttcccatgtcgaaattcatgggttctccgtacacattatcggcaacaaccgatacatagtcgcaacccgccgataaattactccccgaaattttcaactgtacaccgtgaggagccggcaacgtattcaacgggataacaggcttggcaaacagaagttcctccgattccttcaccgtagcagtctgcgtgaataccgccgagaaaggagcaatcgtgtttccttcccacgaatttatcgaaacaaaacggctggcctccgggtcataagtatagagtatatggtcgatactcattctttcggtagtataagagcacaaataaggcacaccgaaaagattccaacccatattctctttatacgtaaaatgaggacggccaccgaccaaagtcttcaaattatgctgtttcaacaaaatacttttcccttcttctgccgattcttcataaacaggcaatgccgatgaagatttcgagaaacgcacagtcaccgcatccgaagcagaaggagtcgccatgagataaccgacattcgcgcccatctggttattttcaaacgcccaatatttactattctgaggagcaactacgctatacaaatcttcggctcgcttagccccgtcatactcgtataaatataaacggttcttgtcgtcccccgattcatctccggcctgtatagcctctaccggtaaaccgtctatcgtaacgccgttcaacatcgtaccgttcccgacttcaagagagaatggcagactcaccatatcccaagaagctgtcgtatcattaataagcggtttcaaatcacgctctatggccagattataaagcgatacagcatgctctcctgtccgcaaacccgcagcatggtgaagcaacaaataggacggtgcgaaatctttcgtaagggcatcggtcagccgcacttcactttccttgccgacatagacgacgcttcccgcatgaggataataattatcgctcacgttgacaaccttctgcggagtcgtattccaagtttcgaaacaaccgtaatccgggcgaattacttcaccttccccatgaaacttatcggtaaacagccgcacattacccagcacatcgcaatcggtagacagatcgataatatcggtatattccttaccattcctgatcttaggcactgtatatccaccgatagtcgtcaccggatttccttcatggtctacacctgtttcctgtaaagctcctattccaaacaagactgcatctttctggtcggatagctgataacgcaaatgtgtatcatcggtaatataatccccgacataaagcggactataagcattccccgacaccgaggtcacctctccgtttatcgtattgattatctttcccgtaccgccgatttgtgctccctcgccgggggctgtcacatgaatggctgccgcatgctcgtccaatgcgacagcggcgctgccttctttcaccgtattgtcatgtaccaaaacattgtagagcaacccgtccgtttccaccacagcaccgtcggggttcacattattatatataacactattgacgatggcgaacgagtcggcgacgatcaccgccgggctgtttttgcttcccgtaatatgaaagccattcagttccgcccaattctccacaatcgtcccggcggcacggtcattgtccgaacgcacgacaggaaccccttccgcctctaccgaaaggatactttccggtgcattcttttccaacaaaccgggacgttgagtcagcttcgtttcgttggttccccggaatccgccataaactttcacatttgccatccactgtaaagtcgtaggcaaaacgtagtctccgccggctacccacaccgtaccataagttccgctctcttccgggtctcccgaatagtacgccgaataaatggcttcctgtaaatcgcccatagcatcgtcccaactggaacccaatccgaatccgttaggcttcacatataaattaggatagaacaaccgttggtactcataagcacctatatctatgctgttaccggctatacgacgattgcctccggcatccacgaacatgactctcgccagcgaatcgccgggagccacaggctcttctaccgaaccaaacgaataatacgcaaataaatcggtgtaccatttatcgttttccgctttattatatgagtcgcctgtcatgtatcgataccccgtattgatcagtttacgccccggacgtatgttatactttttgtccaacggagtcgcttcatcgggagcttcgaaacggggaccgtacgacatatcctcattgtcggaacttaatgttttattgatattggcagccttatcgcccaatacgacacctgcggaactattccaataaacatactcggcattcggctgctctgccgtcgcatcgtccacctgaacggcattgctgtacagggtcgcattctgcacatctatctggttgttcaaatctccgacagtaggaacagccgaagtataattcctccaaaatatattgttatagatctgcaaaggttcggcgacaagcgctccacgtgcgtacaatccgcctttggagttattggctatcgtgttgctgacaatgttgcccgtcccgttcaaagcaagcccccaagccttgttggaatgaagcacggtattatatatattgcctttattcagatacacagccgcacctttttctccggcagccgtattatcgacaaacacgctgttccgaatcgtcgtactgccattggctgcatacacggccgcaccggtcgaaccctcgcctgtcgcatcggctgcatttccaccgacaaaagtaaagccctctatgtttacaggagccaacgccccgttttctccggccgtatccatcgactcgtctatataaacgaggtgtttcgaatcgcttcgatttcctctgatataagtcgggtacaatataggatcacgcaaattatccatagcgacatcggtccccgtgatgttgttgggatatccgcccctcaatgtcaaactcttggtcgagtattccagatttcccacatcgggtttctccaaaacgaacgaataaccgcttgtcccgtcttgcaggaacggcacatagtcgcccgaagcaatcttgatatatttatcttttttattggggctgagcaacagtacctgaatagcctgatgaatgttagacgtagccctttcccacgtttctccgttgttttctttatccgaaactgcttcggaactcttcacatacagtatattaccgccgaaaggagtcaacgataccgtttcatattcataagcccctatatcgatcgtcccctccttccactctttcacatcgatcatatctacaccgtctttcttaataatgtgatatgtatcgggttctttggtaatacgccatttactgttcagcgtatccggcacattctcgcggcccgacacttcctgcacggcataatatcctttgccggaaccatcgagtacgacaggttccgtcgtaattgtcgtactcttcaccgagccgtcgggattcatttcgataaccgtattcagtcgacgtgtaccaccattcgtaccccggttaaccagcgtcgagagcgaaggcagagagaaatcggcagaagcgaaataatttcccgctccggcataatcgctgggaaatccgaaccgaggccccataaccgcttcatttgcccgatccagaaagacctcgaaatttcctgcatcttcatcgacatcggctgccgaagtaataatttcccaatggtctgcattgatacgttcggcatcgtcattcccccagataaccgtattggtaagattattcccggctgtcgaagccgaataaacggtactacccgatgttacatcgcccgacacattctcggcatgggcattacgcacgatcgtattgttgattaactgcgatgtcgaaccggattcggcataataggccgagcccgtcgatgccgtattgttgtaaatcaccgtattgacgatgagcgacttcccgccttcccgcagatagaccgcacctcccgatttaccgggagcctcgttcccgcccaatatagaaccataaatctctatatcgctggcatacacggctcctcccccgaaatcggccgtattgagcaacaattggcaattgcgcaaagcaatcggagccaaagcacataaagccccgcctccatgatcggtacacgacgagttaccttttaccatctttattccatcgagtacaaccctgcgagtagcctccgagtcttcataataagccacatgcgaattaccggaaccgccgcctatatcgcccgaaagaatcgtttcattagcgtactcgaaatcttcgagcaagccgttcccgttccaatcttgacgaggtcgctcgctcaaaaatgcctccccttcgtaatactggtccgatgaaggcatagcctgagtttcttcttccgtaacgatattaatatccaactccgaaaccgtattctccgactgattcttattgtctatcgttatatcgctaatttccacggtatatgcagcttttccaccggaataaggatgaacagagacgagcgaaagcatatcgccattggacaatgtattttcctcatcagtaatctctacggaggaagtgccgtcatataccaatccggtctttaaatccaccgtcagtttgtactctccattactaactcttccatttataagcaaagactttcttacaccggctgtcgaatataactgtatacgcaacctgccgtcctcgttccctttactcaaatcggtaaaacgtatcgttgcatgcaaataccgattactcgggtttgttctttcgtatttcaccgcctgtggaaaacggaagtaggctcccaattggtcattataataagtatactcttgccaaaaatacctcctgtacctctcgtttgttaatacgacaccatcgttccccgaaactgtaatagatgccctattaggacttggacaataatgcataccgtatgctcctgccgaatttccggcagcataataatcggagacattggaagaatatgtattcaatttttccgcttgcgaaagattattcaagctcaccgaggcatcataaggaacacccgtagaagtctgatgaagaatatcggtatcgagaatttccgtcgataccgtcgtggaattcttgcgattatcgatcgtagcgctatacaactttacaccggccggtaatcccgagacgcgaacagcctcgatgaccggagctgtcgcccaatcggtatttccgatagccagatatcgcaaatcgtaaatatactcggtagtgctgtcggtagcgatgaccggcaattccagctcatgagggagttggaagccattgaccgtcacaacaggagatgacggtgacttctcatcggtcgtgaaatgcaagaaccacgaagagggttcgtcctccaatgcctttacctctggataaaaggtaatctctccatcaccgcccaatgtataggaatagtctcctttgttccatacaccggtggcatcgacacgcttcgagggttccactttaaacgattctatccaactctcgtaataaggcaagttactgccccggaatcctccgtatatcgatgaatatctgttaagaataaaagaagttccccaattatcctctttcaccgaagttttcgggttatacgttcccttcgagacccatatctcgcaccggcgagtatccttattcggatcgtgttcgaaattggcctcattcccgaaataatcgagagcttgctgtatatcgcccaaagcgtttcgccaactgcggccgttcgccaacccctgtgccgtttgcgacacatacaaccggtagattccgtctgcccccttttcggcttcggtatctcccgcagggtcgataacaaatatcccgtcataagcaaaagctcctatctcgaaataatccctcaaagaagaatcctctttataaaaacgattcgttccgagcaaatcgagtcgagaaacatgcaatgcctccatgagcggagagcccggctgctcggctccgataccggcacgaatcaacgccgatacacgtttcaaagtaaaatcgaggttatcggggtcggtaaaaccgggagcattcaagcccactatggtcgatgtattctcattcgtactcgtcaacgccatgtttccgaaacccacgactttgataccttcgaccgcacaatgattaaagatatagttttgataccgcacgcccgtaaaggtcgtatcgacctgctgggacatgtttccgtatatattttttccgttaccggaatcgttcatccagaatacagaattgatgataatcggcttcacgcctatcgatataccaccaccggagccattgttcacagtcgtgttatcgaccaccgtacaatttacgaccatcgaagagtcgtcggcataaatacctccgccattggctcccacgttattataaactatcgaaccggtaatccggccgcccggagctaagtaaactcctccgcccttatcggaagcagcacagttgaaaacggcacaattctgcaacaatccgttcgacgtaaccttaacaccgccacccgactgccactcttcgtcagacgggtgattggcatttccataaacgatataaacaccgttgagcaaagctatttcggggttgggatcatcgtaataagctgcgccctcggcaggcatcgtggcgttgtctttatgctgcttcatgccgaacgttacgacacgataggcgctttcttctgtcgaactgccgatcataccgttgaaaaaagttctgttcaaacgcatattacgtccttccacggtctcatcgtcagagattcccgcaaaccctccatacacctctatccctgccggaataataaacgaagcggtacgaggctgatcgggaagaacgacatcggtaggataataagtgcctttcgcaaccctcacttgaatacgagtaatatctctatatcgacccgatacgtacgtctccttattgtgaataatataacctgcccagttgagagctttttgcaatttcgcttcgcaagcggcattcgcccacgacgaaccgtctaccgtaccgttagccgccttcgtcacataaatgactcccacctgttctccgtcgatagtcttgatagcgggcataatcggctcgctttggtctatttcgtatgcccctatatcgatagaacagtctttaaaacggtctgtatagtccatatcggtctcgggtaatttaatcccttcgggactattattcccggcattgatacagggtgaagtgccctgtaaacgatagtcgttattttctttatttcccgacgaacgatccacgaattgcggaacttgattgataatgttgtcttgcgtcaagttagcgccagagactcccgatatagaacccgagggataacaacaatgcgaagttctcaacactacattgctatgagcctgtacctgagacgagcccgaattattataaataatggtattgtaaatattggccgcaccatcggcaaaccaataaccgcaataaatggctgcaccgctaccggagttgtcggcaatcgtattgttataaaaatcggctacttcaatataaacggcctgaccgttggaattaccgccagatacggaattaccggcaaatacgcaattgtacaacgtaccgtaacgcatgtaaacacccccgccgtattgttctccgtaatcgctccccaatgcaggcatatcgttattgaaaaacgaacaattggaaaatgttccgtcgttacaaaatgcacctccgccgcgactacgggatgctacattataattgtttcggataatacagttttcgagccgtccatttttccgcaaggctacccctgcaccgccatcttttccgtgacgtattcgagttcgaccgttttgtattataaatccgtcccatatagtctcgataacaaatggattcaacgccacattattagtctcggtcgaagcctgtccctgcgaacccgcttccaaacgacctccgtcctcataatacgggaagggttgggtaagtaccctacgaactttattcgcattgtcgtaccgactgttcaattcatagaactgactcgtcgatccaccggcatccatatcgaaataaggagcatacccatcaagcgaagtaacagcattcgcctcggcggtagtcatcgtctgtataatcgtattgtagatgcggggattacgctcgtccttccccggtgttcctatctcgggaaatccgccgtacacctgtacggcatcccgcataaagaatccccgccgactcgtatattcccctttggctacccacacttcgaccaaagccgtcgtatcgacaccaacaggtatttgtaccgatgcgctacgaccgttcgtttgattgtatgtataatctgtataattcaatgtctcataagcgatccgaccgcttccgtcctttttcaacgatgccttgtatgcctcgttgacagcatactgcaaaccggtaatatagtcggtagcatcgcggctgtcgtattcgatttgatcataaggcagaccgtcgtcgaatccataccacgcatttccattgatagcgttcgcccacgaagaaccgtctcccgtaccgaaataagaggtttgaggagaagaggccgtaccggtaggcccgctacgcacgtaaagaaccgaaccgacaggattcagacaagtagcctcataagctcctatatcgggggctccacccacagcgaaattatgccccgtaatatcggcatcaagaaccaaatccggatcatcaactatactttcgtcacctgcaatcaccaacggagatttacaagtaggttcgaatcgagccggacctcccaatggcgtatcgtatccgctcgatatagcccccacattccgagtagaattgacgaacgacgggtacataggatcaccctgaacgatgctcaactgcatgttttcactccatagattccactcctctggtgcatattggatagcattgttacgaatatcgagcatagtggccgaccccgtaatttgtacatcttcgggagcgatagtcccggtcgaagtatttccccacaaaaccgagttataaagtctcagttgcccatccaccgcacaaatgcccggggcattgttatgtataatcgtacagtgattgagacgagcatcgtttgtaagagttattgccgaataaaaggattcgctcgacaatcccgtattggtattattattcaccaccgtattggtcattaccaattttttcgtcgtacccaacataacgattccggctccgttcgttgcgacattattctcgatcatgcaattgcggatatgcaatgtgccatattcgtgcaacacaccacccccggtcttgatagcagaagaaccggtcgatgcatctccgttgacgatatgaaatccgtcaagaatggcttctccgtcgtcagacatagtcaccacatgataaaggttccctccggccaacgtaccgtcgaacaccgtacggaaatccaccggattacgtatcggttcggcgacatcgctccctgtcgggacaaacgtctgtccgggaaccgtagagccttccgtaccttccaatttggaattgaaaccgccatacaaggaaacgcctcctcgcaaaacgaccgacgaagtgcgacggtcactaccgatggctttccataccggatttatcgtcccctccttcacccatatctcacgagggcaaccgggatattcggtatccgggagtcccgccaaatattcgatagccgagttccccgatataatcggagactcccaagactcgcccgaaaggtccgtatcgaccgacgggtcgacaaaaataaccaatttctttacaccgttatcttctatgacgctatattgcaaagacggacgatcggaagcgaaagctcctaagacacgaggctcgacgaacgctttgctgagaatatcggtcatcgcgacataaaactgtgttttcaccggagcatatctgacatacggagcctcggattggctgcctccttttctttgtagggcagaaaattcggacggaacccaacgctgtacgtcataaatagttcgcaacgcattgtcgagcgtttgagtgccttcgacatcggcagctgtcgtctggtacacgccggcctcattgttgataacgtcgacattgccgactctcacattggtaaaatcggggaaactggaatcataagcgatagaagaacgtccttttgaattttgatcggacaaagcatacgttttttgagttacggtattcacgccccaaatcgtattggaaagattttgcaacgccgtattataaacctgtatcgaagccggcacattcgactcggccgtctttccgtttttcccgtaaaattgccgagtatgttcgagggtcgcatttccccaaagaaccgaattatagactatgccatatccatcgacgatcataccgcccgaatttccttcttggtcggaagccaccgccgaacaatagttcttaaccaccgtagaggaagaaagccctcccaacttatcgaaatagaccgctcccgcatcggacgaagaggtattgttggaaacgagcgtgttcaccaagacaccccggtacatatcgtctaacgattcttcgtatgcaggattgttatactccgcctcatcgacatatacaccgccgcccacgcgagccgtattgttggttatcaccgtcctgaaaacggttccgttccccaatatgtacacgccgccgcccaatccgttgcgcacctgcactccgggcgaagcattgcgaaagaccatgctgttcaccaacattccgccgttattcatcatcaccccgccaccgcgagtcaaggcaaaattttgataaacgatacaattcgacacgactccgttctcggtcaaatagattccaccgcccatacgggtcgattctccgcgctcgccatagtcggcgcaaccgcccgtaaccacgacaccgtcgagagtcgtctccacgggaagcggctttgccgtaacggcttcgtacttcgtggttctttcgttaaatccctcggaagcgaaccataccacatggtaggagttgcgcccgtaatattgctcccatttcttctctccggcattccaacgccaacctttctgcgaatcgtcgttccggtcgacatctccgctgaatatcgtacgattggcaaacgcccattgaacatcgagatggtccgggtcgcggggacgagtcgtgctgttgtttatcccttcgtcgccggtttgtccccggaatcctccgtaaaccgagataccgctacgcatgatgaaagaacgatgcctttccgtacggccccttatacccgactcatcggtaaatgctgccgtggggtaatacgttccaccggcgacccacacctctcccactacattccgggcatatagttgatcgatcgccatctgcacgtcctgtacagccaaacgccatgtacttccgtcccggacttctccgtcggcaagaggcggttcgtcgggcgaaagctgacgaacatacaatatatttctgcccgaaaccggctgatattgataagctcctatatccagcgtcttactgactatcctcggcttcccggcaatgtcgtaagaaacatcggtcccgtaatacgtgttcaacgtcgtcatccaagaaccctcggctttcgacaggagcacagaattttgacgcaacaaaaacgaaacgcccaaatcggcatacacaggctccaatatagcccctatctgagtcgtaggattgataaaattgggcacagaacccgtatggtcattataaggcaacaacgaaatattatcgttgcctttcgtttcgtcccaatcgacgatcgcacaattcgagacacggtcgacaagagcatcgaatcccttcaatcccgcatggttcaacgggttgatactccatataaccgagttggatacgctgatcgaagaacccgccacatcggtatcggccggacgacctataccatacaactggttgttgacaatcgtattattgacaatcgaggtctcatcgtatacacaaataccgcccccgttattattgtaaacgacattgtcgaaaacgactcctgcttcggaatagataccgcctccatatccgaacccgtcgcgacggaatgccgaattggataccaacaccgagttatagacaaaacacggttgggagtccgaaccgctattcttatgcatataaacggctcctcctttcgaggcaaaattaaaatagaacaggcatcgctgtatgccgcaaccgataccgtcgagcgatacacctccgccgcgccccgaattaccgtctccatcggcagagcccccgacaatagttatcccgtcgagcatcacgtccacactcgacggatcgaaagtaactaccgtatggagattgtctgtccgggtggtattctgggtcgggtcgagcgaagagaacatgttatccgtaccgactacatcgtttctcaatcggtcgcccgataaaatagtctggttcttcaacgcccacggctcctgccggtcgcctgaatagacattgccgtattctctctcttcgagactgttctccccctcatagaccaaagctcctaaatcgtcgaacacttgcccgcgaaaaccgccgtaaacaacgacctgatttcctttcaagacgaacgaggcactctgttcatcgccgggaaggagtggttcggtcgggacataagtacccgccgcaatccatatctgcaatgtagagttaatagcattccatgtatcggtagaacgaagaatcatttgcaaatcggaacccttagcagcattcgcccacgaagaaccgtcgaacgtaccggctccttcgggggaaacatatatgcgtcgcaaattgaaggccgggcgagccggctggatattcgactgagcctctaccggtaagctcgtcagcgacaacagaaacaatagcagcaatcccgccgaatatcccatgcgtttcgacacatcggaaacacggcctgcaaaatcaataatttctctatttcttccgttcaacataacctataattccttttctatatcgaagctgtccatcgataattatattccgtttgcgtaaatcccaccacatcgaaccgcagcaaataatacggcgcaaccgccaagtcctcgggggtatcgacgtgtatgttataagtagtcatctttacataagcgtctgcatatacgctctgcacgaccagctctatatcgagcgtaccgctatcgtaaagataacagtcgtatcgcccgttaatccatgccgattgacccggtcccgaactaccggtaaggctgaccacgtgatcgacgacggggtcattcgacctcacggcaaagaattttccctctttgggtacatttttcaacttcaatgaaacgactttcgccgacgtacagtccccatgttctttctgtccggctggcttggcattgtaattggatatagccgtccctatattgtacataatatcgaccttagaagccaccagcccggcatcgataactcccgaatgcttcatttgaaccaattcgaggtcaagcaaagtaccggcatataaatcgcgcgaaggcgtggcgatcgtcgtcaacgccatcacctcgtcttccgtcgacagggcatcccattcgtagtgactgccggcattgacgatagcataaaacgaggcggtgcacttcggcacgtctatggcttgaaactcataataggccgtgctttcgggcagctctatataataatgttccatgtaagcggcagcgccatttttaggctctacatacatgaacaggttgatattttcgatggcatcaggcatctccggcgatgtcccggggtctcccggaagccccaccgctctcgaaatttcccggccggtgtatatactcaacgtcacgctcgccgtctcctgcggttccgacggactgccgggctgcaacgagttctcgcctccacagccgccgagcaaccatgtagcgaacaaaagtgccattatcgcatatctctgtttcaacatcaaagctcctattcgattaaacctatattcgacaatctgcccgcatgcgggaatattatatatccacatcgatatctcctcccggcttccagtcgatagtcaccgccacagtcgcctgcacattgtgaccgatatctatactgccgtcgtccctcaccacaccgtatatttctatacactctccggcgggaagcggctcggtcagattgatcgtatttcgtgttattttatctcctatggtaacgtaaacatcggtattccagatagcattttcctccgatgggttacggttcaaagacttcgctcctgcactcgcctcattcctcgacggaaacgaaacagcttcgaaaagcgccagtccgttttcatctttccccgcttcattcatctgtacgacaacgggacggtcgtactcataaagactgtcgttacacaaaaaaccggttgcggtttcattgacatatccctctacccgttttaccgggacgacgggatcggttccataactgaggtgtaacctcgtcttggaaatacaaggcgtcaaaactacctcgataaactgatttctgtccgctatcgtaaatcgttccctcccgacatacagttccgaaacatgcgaagataccgtatcggccgccgactcataagacaatttataacgatcggacgcgacaccgaggtcggaacatttcacacaactcgcctgcgaaatattggcaatggcaaaatggtgataatcgtttgcaggcagggtaatagcgtagatattgttcgacggcattcgttcccgctctacatactcatgataagcgagcgatttgttaccgtcataaaaatgcatattgagattctccattctacccgaaaatgcctgtgtatgggtagacagttctattctatatctgacggtgaaattgttgcaatcggacatgttgtcgtcgatgcaaccgctcgataacggcagcaacgcgaaaaagattcccccgacaacccatctttgccaatcacctgttttcattttctcgatatttatttttttgaggaaatatctccggcgaatcgaaacgctcccgattcaccggagacaaattttacagtttaactatttttttcgaaatcaatcgccgataggtacatcgataaccaaaccggctttccagtctatatcgacagccaatgccaattccaaacgcgggttaatcaggtcgggaaccgtattgtaggcttttgccaacgaattgatagacaagttcgccgtcgtattgtaatcctgctggaatacgcgaacgacttcactcttactgttgtccttcttataagtcagctttcctaccaagtagaacgttccgccttcgggaaccaaattgccgtctaaaccgtagaattgaggaccgtcattcaagacctccaaagcaatattgggtgtatgtcccaaatcttctgcattaccggtagaacaatcggccgtctcgggcaataagctgtatataaatggagtcataccagcaaaatcgggagtagcggctttcgtcaattcgtaatcattggtattcattctgttgtcatatacaatcttggaataagtgtcggcagcagaaggatgcatttcccaatccagtttatcgggcagaccaccaatcaatataccttttacaacaaaattatggttggccaaagtcaccttagtatttttaccggccggaactgtaccgtcggccgatttgaatgcagctttcacatcgagacgtgccacaccgtaattgatcgttttgttcaaagcaatcttcgtcgtcgctaccgtaatcggcgtacgagctccgttataaacaccattattccaattagtaaatgtcggaagagtcgaataagctaccggataggcattggtccaataatacaaagaagaaggatagctgtatgccttcgaagaaccgctcgtaacaatacccgaaccgccggggccgttctcatcgaacacgataataccgttatccaatttatacgctcctttcggaagattggcggggaaatctttgtaagcatcttttgccaactctgtcgccatattatcgaccgatgtctttgccgtattggctgctggcgtagagtatttcgtatgtaattcgttcaacccgtccgaaagatactgtaaagccaatttcagattttccaaagaagcgctattgaacgaaaagtaaccattctgcaactctgttgccttattcttctcctcaccatctgtcaaactaccgacataagtagccaatgcatccgtaacattcgttttccacgcctctatcaaagcggctgcggtagaataggaaccaccggtataagtaccttcggtaatattcttcaaagtaaacgctatgtcggcaggagtcaaagaggtaaccgaagcatcgggtgtcatctccaagacacctttgtaagcagcgtcatgcttggctttaccgtaaaaaagaaaagcgatgtcgccggaaggaatagttacgtcggtaaacgtttttacaaaattcttggcctcaccattcgtgatttcagcacctgtcaactgggtagcaccggccaataccgaattggctcctacataatcgccgctcaaatttgaaaaaggcattaacctcaaactttctatacccaagaaattgtcgttgccttgaacatcgtcgctggtagcacgggataccggcgaaggaatagcgaacgagaaactcgtcttgacagcatctctttcccccacaggagtctctccccccggaataacctcttcgttggaacaagacgacagaactgcggcagcagcaaggaacatagtcccggcttttgtccattttgttttcattgttttcatcttcgtaattgtttttgttaaaagattaataatcgttttctatattttccaagttttgaatagctactttgtcacccatagcggctgcctgcttgaacaagtccaatgccgtcgctttatcgcccaaacgataataggctgtcgcgagagtgttcaaacagcgtttgtcttcccgtatgggtcgaagcaaagagacagccccgtcgaaatcgccctcggcaatcataccttgtgcttggttgatctttatagcgttgtaatccggctccgaagtataataaaccctcatgtatcccgaattacgttggtcggagaataccgagcgcaacagctccttgaaaggctctccaccgtccagccggcgcaacaaccactcccgacggccgagatcggccgtatggtcgataatatcgagcatctcgtcccggcaatcgaatgtgctttcttccacccgatcgcgcaattcgccccatgcctcgcccccgttggctacctcgtagaggctatccggcaattcgagataactgtttacatactccttcaagacctcggcgcgagtgcctgccaaacgggtattccggccgagaggaccctcgggcgaagcaaacccgacaatcaatatcttcccgacatcggaacggtcgtcggcatagatctgcctcaatatatcgacgattctaccgagcgtcacatcgttgtttcggtaatcgcgacgcaagtcggacttatcgagagggaaatagactttcaatgctccccgatccctccacacggtcatcgaatcggaatagggctcgtactctgccatcgggaacaaaaccttttcgacctcggccaaccgttccgccacgctcggtatcaatgccaccggctgtaccgaagggacataaggaggacgcagtttcacatcggaacaaagaaagatgcccggcaaaggttcgaccttgcaacacccctcgcgctcacataacaggctgagatcgacaggggctctacccatccatttttcataaggcagcacgcaatcgtattgcaactcgccgccatcgacggtctgataaaaaggaacttcatacgttttccccgaaagcacggcttcccggcggcgtaacttttgtttacgcttgcctataatctctatttcgtcgagagccaaagaatccacaccgttctcgataacgggaataagcctttgtacataatcggaagcaactgttcccgacggaaccaaaattttgaaacttacccgaatactatctcccgaacggtgtatcgaagcattctcgaccttcacctcggccccggcaaaaaatatagcccagacaaaaaccggcagaaacactatatatcttttcatcgctctcatttcagtatatagattatagaaatcgcggcttcggtaggagcaagatagcctttatggccgtcgcctattttacgcccgcaagtacgacactggtaataatcgaacgtataaatcggctatatttttagcgtgttttccccgatgaattttattgtttgtaaaggcttacaatacaaataaatttcaaagtttttattaataatataaaaatcaatctgttaaaataaaatatagtcatcgtatttgtattgtaataattctaaaatattgtaactttgtcaccgtatttcaaatggtagtaatggggaagcggggcaataacaaatgatgcaaaatctgttattgcctaaaaattagaaggttattataattgataaaaaatatatggggcgaataaaacgatttgagttataaaaaatatattttgtactaatcctcacataattagacaaatagatgaagagaatcctaaatataattataataatattattatcggctatttgtttgaccggtacggcgcaaaagatagcggtaaagagtaatctcctcggttgggctaccgccacaccgacgttgggagcggaaataggattggacgatcgttggacgttgaatactcatatctactataatccgttcactttcagggataaccgaaaatggaagcatatccgcgtacaacccgaagtgcgttattggctctgtcaaaagttcaacgggcatttcttcgggcttcatgtattatacacccatttcaatgccggacaagttccgcttcctttcggaatttttcccgatgttaaaaaatatcgttatcaaggcaacacttacggagccgggttatcttacggttatcaatggattttaacacctcggtggagtatcgagggaagtatcggtgtaggatacaagtataatacgttcgattattaccagtgtcgtacttgcgggcgtaaaataggcgacggccataaaggctatcttgctcctaccgaannnnnnnnnnnnnnnnnnnnnnnnnnnnnnnnnnnnnnnnnnnnnaatctacatttattgggttaaatagggatcttcacatattctaaaaataaaaaaaaatttgcctacaaaaacagagggatcttaaccaaaagggatatatcgaaaccactcgatatatccctcatttttagattcagtagaaaatttgcgaggtaggaggaaagggggacgcaccaccctgttcctgtattcaaaggtatcaaccttctcccctgccgtgtcccgtagcattacggggaattgcagagcaacataggggaaacaccgaagaaaaagtagttgctaaaaagaggggtaaaaaaactgccaagtagatttttgatgacattcaacccctccgtcactacgtgacacctcccctatattttgtttgacaacaaaacacaggggaggtgtttaagacacccacacaaaagagcctttccccgatgatataaaatcaaattttcaaaccaaacgaaatgctttgcgaagctcctcggattgttcgtcggtcagaccttcgggctcgaatcccatcgcacgagcctgcaaataaatctgcgccgatttagacagcgtatcgatcatatcgaaacactcgatcacatcgccaccgacagccaatgctccatgcttctcccacataaccacatcgtaacgatcgagcaaccggatagtagcatcggccagttcgagcgaaccgggcaacttataaggcacgatacccaaacctttgggtacgataacccgcgtttcgggaatcatggaccacaacagttttcccagtacatcgggctgtaagaacgaccggttatgggtcatcgccaccaaatcggtggggtgagtatgcaacacgaccttattgtcgacgccacggcctttcagatagtcgtgcatcgagagatgcgaaggaagttccgacgtaggccgtaccggattatcggcgataatttcataccaatctcccgtatcggaaatacggatcaccgccatattttccatcgggtgcgaagcgacataacgcatacgccggttcgtacctgtcaccaaaaagaaattccctttcaatgcattcatcactttgggtaacgggtatcgctcggaaatggcaggcaatgccttctcttcatcggtcaataaatccgtaacgttcaccgaaatattcccgccgtttcgttcggcccaccctcgttgccacaaataaccagccacttcggcgacatcggcgatctggcattcgagtttatcgtttttaatcagtttcatctcttttatttcattataaattactgtttaccaaattggggaaaaccgtcgagaagataagaatcagcaacccagcgatcaatacggttacggtccgccgtcctaccccattccactctttcaacaaaattccccacacgttgctgaaaataacattcagcgacatcaatatgctccacgagaaagccagcatgaccggcgaaccggtgaagaaactttttcccatgcccaacccgaagaattgagaataccaaagcaaacccgccaaagcgcaaaacaataagttattgactcctgtcgataccgataccgagaaatactccctgccggtacgattcttgatattctgccacaggcaatacgccgcattggtgcaaaaaccgcctaatgtaaccaacaggatcaccgggttaagggcgaacaagtcggacgcacccaacgccaatgccgtctgctgcacttcggctccggcttcgagtccgagactgaaacaggcactcatcataccggcgagcaaggcgaccgaaatccctttggtaaaagcgaaatcgcgtatagctttctgcttctcctcatcgctcatattccgagccttcaaactacccgcataaccgatcaccgcaataccggccaacgtaatacacaccccgggcaacaagacgagaccttcgccgcgaaacagattcgttcccgcaaacaaagccggaagcaatgtaccgaaagccgcacaagtacccagcgaaatagactgtccgagggcgacaccgagatagcgcatactcaacccgaaagtcaatccgcccactccccacagcacaccgtacaagacagacatgaacggaataccctcggagtagagttccccgagactatgacccgtcggaaccgccagaaacgcacccaacaaggggaacaccaaccatgcgaaaatcccctgcacgagccagaaactctcccagctccaagatttcactttcttgataggcacataagagctcgactggccgaaactccccacggcaataatcaataatcctatgagaatatccatggctcgttactggcgtttggaagtcacatttttctcataagcctcgatgtcggcgatataatcttcacccacgggcacatcgttcgtcaggcagaagtaatcccaaacagcattccacggcaggctcttgcactcttcgagcaaagcgagacgttcgaagaaacgcccttcggcctcatatttgcgcaacagggcaagcggttcgagcaacgcttgcaagaaacatttctgtgtagcccgcgacccgatgacataagccccgatacgattgatagaagcatcgaaataatcgagaccgatgtgtactctcgaaagggcatcgcaacgaaccacttcatgagccaagtcgagcgtgtcgtcgttcataatcgtcacgtggtcggaatcccaacgaatgggacggctcacatgcaacatgatttcgggcgtaaacaacagcaacgaggaaatcttgtcggcgatactttcggtcaaatggaagtgaccggtatcgagagtcacgatcttattgtgcttcacgccgtaacccaaataaaaatcatacgaccccacggtataactctcggctccgataccgaaaagtttggcttcgatacaatctttcatgtgccggtactcggtagcgaaaatacggtcgagagactgttccaacaactggcgataatagagcctgttgacggtcgtatctttggaaccgtcgtgaatccaaagattcatgatacaaggatcgttctgatattttcccatctcgtcggcaatccaccggcaacgacgagtatgttctacccaaaattcacgaatcgaatcgtcgggattggcaagtgtgagcatgccgcttttggggtgggaaaacgaagtggaattaaaatcgagcttcaatccgttctctttggcccattgcatccaactggtaaagtgatcgggagtaacctcgtcacgatcgaccttcttaccgccgaaatcgccatacacctcgtgcagattgatgcgatgcgaaccgggcaacaaagatttcactttaagcaaatcggcacgcacttcgtcgatattgcgagctttaccgggataatttcccgtagcctgtattccgccggtcaattcgccgtcgggattttcaaatcctgaaacatcgtcggtctgccagcaatgcagcgacaaagatattccctgcatttttttcaacacttcgttcacgtctacgcctatggcggcataacgttcggcggcatactcgaaagccgccttcacggcttgttcattcttcatgatattctcctttctatttataataaattacatttcttcttgaaaatcacgtatttctcgttccacagttcggtatcgcacggttcataacgctgtaacgagaccgctccggctgccaatcgacgcatggaatcccgatcagctaccacgcccaaagcccgcaactgtaccaacacattacccaaagccgtcgcctcggaaggcccggcaatcacaggaagtccgatagcatttgccgtaaaacggttcaacaaatcgttttgcgaaccgccgccgataatatgcagacattcgatgggaaaagatgccaccgtctgcaagcgggtcaaaacaaagcgatacttcaaagcaagactctcgaatatgcaccgcacatactcggcatgcgttcgcggtacggccatgtgatgagacttgcaataatccgcaatagcctccggcatggaaacgggattggaaaaagtcgcatcatcgggatcgacataactctcgttcgtggcaacggactgtgccatttccacgatttgcggataggaataagtcacacccgatttgtttttccacacttttaggcactgttctaaaagccacaatccggtgatatttttcagaaaacgggtagtcccgtcgataccgccctcgttcgtgaaattcattcgataagcctcgtcggtgacaatcggcttttccgattctatgcccatcaacgaccaagtgccggagctgagataagcgaaattccttcccgatgccggcacggctgccaccgccgatgccgtatcgtgaccggcgacagctacaacgggaatagccgacaatccgatttcggccgctacatcggcccgcaagttcccgattatccggcccggcataacgaccggaggaaatttttctaccggaatatgcaaaggttccaacaaccgttcttctatccggcaagtttcgggattcatcaattgggaggtcgacaatatagtatattcacacacctcttttccggtgagcagataagagatggcatccggcataaacaaaatgctgcgtactccgtctatatcgatactaccttcgagacgcatcgcataaagttggaacagcgaattgaaattcataaactgtataccggtcaaacgatagacctcttcccggggaatatgtcggaaatattgttcgggaacgccctcggtataagggtcgcgatatgcacggggcaacgaaacgaacgaaccgtcgggccgaacacagacaaaatcgacgccccatgtgtcgactccgatagaatcgattgcaatctgtcgggaagccgccatgttcagaccttctttgatagaattgaacagagaataaatatcccagtaacaacgtccgtcaatctctttaatcacattgggaaatcggttgagaatttccatctccaaccctccgtgtttcatttttgccaaaatgacacgaccgctcgtagctcccaaatctatggctatacatgcagtgtctttcatgtaaaaacaagatattttataatttacgaagcaaaaatagaatcggagaaatagattcgactgatgtttttgatacaaaaactttctattttgatattccgaaaagaaatcctatatttgggctactatgaatatggaagagaaaaaatcggatgctttaaaatatctgagagtaaatgctcgggacgaagaatggggtatcgtcattacgacggtaggttaccaatatgtttcgcctaatcatgcctacccgttgtcgaaacacccggataactacaatttcaagaacgaaggcaaacgcaccctcaacgaatatcaattggtttacattacgagaggagaaggctatttttccagccggtcctgtccgaagacacacatagaagccggaaccatgctgttgctcttcccgggagaatggcacaaatattaccccgacgcccgaaccggctgggacgaacattgggtagggttcagaggattccacatcgacaaccgggtaaaaagcggcttcttcaccccgtcgcactgtctgttcaaaataggaacagacgataaaatcatagacctttatcacgaaatcatggacaaggccgaacgcgagaaagcaggatttcaacaaatcgtatcgagtatcgtcttacatttgttaggaagtgtgtactacaaagatttgaatcgctcgtttaacgacgatcacatgatcgacatcatcaacagagccagaatcatgatgaaggaagaacaaaccgggaacttgtctcccgaaaccattgcagcccgattaggtgtaggatattctctatttcgccgggaatttaaacggtatagcggaatttctcccggacaatatcagcaacaactgaaactggctcgtgccaaagaattactgtcctcgtccaatctctccattgcagaaatcgcatttgaactgaatttcgaatgcgtgggacaattctcgacctttttccgcaaaaaggaaggtgtgaccccatcggaatttcgacgacaaagattctgattataagatttttacacattcaacaacagacattcgggtaaataataagaaattgttcattatcattttacctatatgattttgacgctttgacttcaaaatttgacgcattgctcttttgcatctcctcttccaagttacttttgtttccgaatcataaataatatttttatctatgaaaaagacattcgcctatgccttgttgatccttacggctctctattcttgtgaagaaggaaaacaggaagaacccgtacttcccggaacgactcccgatgaaatctatttaaacgtttcgccccatacactcactttcgacgaaaccgacgcgtcgaagaatatcataaccgtcagtacaaatacgaattggaaagcaacagtggataattcgggactgaaaataaacagaaccgaaggaacaagcgaagatacctccatatccattaccgaagctcccgaaggaaagacttgtaaactcacgatttcgacgattcccgcaaatggagaaaaaacgatttccaaagaagtgtccatatcgagagccgcggctgtcgtcactcccgaccggaccattatatataacaacgatttcgacaaagagatcgcagtcaaaaacacatactggccttacctcgaccaattcgacggctggaaaaatgcgaacggaaccggtagcggagccgaaacatacgaccaaatgagcgtatcggtcagaagcgactggacatcggattacgccccacctgccgactaccgcccttacgcatcggggaaaaacaacatctacttcaacaaagccggcagcttcgtctccataaacaacattaacatcgctcaggaaaaaaattttatcctgcaattcggtagttctgaaaacaagacattcgattacgacgacttgaaggtcgaaataggaaacgggacttcatgggtagaaatagactattccagaaatctgacgaacagttgggctttgacgacaagcatgttttcccttcaaaacagttccggcacacttagtatcaggttcaccgccacaggcgccacacaaatgcgcatagacgacataagattgaccgacggagaaccctcggagcaaatcatcgttttcgataacaccgtttatccgttggcagaattgcctgcatacgaaaacgatgactacgtcgtcactcactacggcacgctcggcagtcacagggtgcggaactatactatgctgttcgataaagagaaacacgccgctttgtgggttgcatacccgctccattcatgttatcggggaaacagcggaagaaccgaggcttgggcggcagaccctctcatcgaaatgttatatcaggccaaagtttatggcgaaacattctgctattataaagactattcacgcgggcatcaaataccttcggccgaccgtacggcaaccgacgaactgaacagccaaacattctatgcctcgaatatgacaccccaaaacggagatttcaacggcgggatttgggcttctctcgaagggaaaattcgggaaaatatgtgccaagacactttatacgtagtgaccggttgttactttgggaatggatatacgactacttacgacggatattatggaaacaacgccgatcccgcttctaaaatctgtcccgtacctacccactattttaaagtggtattgcgcactcgttccgggaactcgggaaaagccgtcggtcaatgtggctccgacgagctgaaagccataggtttctggttggaacatcgcaacgactacccccaaacattcagtacagaatattgcaaatcggtagaatatatagaacaacaaaccgggttcaccttcttcccctccgtaccaaaagaagtaaaaaaacaatgtacgccgtccgattgggttctctgaaataaccccggctgagactgacagcacaaaaaaaggggaacggaccgtctaaacgaaatgaacacggtcgacaaggttcttggattttctctccaagaaccttttttatggacaaatatatatacccgtcaaaaaacgcccggaatgaaatcccaagctgcgagccgaaaaaaactcccaatcatgggctcgtgtacaaatacccgcaacttcgatacgggacaaatcgacgccacaaaccgtcaactcctccacagcagccgcccacaaatcgatatgaaaacgacccgacggataatgatgcgctatacgatttacatcgaaaccctccgagtcaaacgtttgtaccacctcatcgcccacttcgaaattgtcggggccaatcgacggccccaccgcaacatacagatcagacggaaccgtaccatacatattaaccatctcatcgatcgaccgttgaacgatatgtccggccatgcctcgccacccggcatgaacagcagcacaagccctatgaacggcatcgtaaagcaaaacggggacacaatcggccgtcgacacagctatcgctacgctcggacaatcggtcatcacggcatcgacaccgtctaaacaagctgtttgttctggcttagacaaccgaatgaactcgtcggttatagacagaactttcgttccgtgaatttggcgcggagaaatcaacgtatcgatacctaacgagcgacagagcctctgtcgatttgcgataaccctatcgggattatccccggtgtattcacccatattatccgtagaatacacatcaccgtgaacgactccgttacgtgtcgtaacgaacgtaacgactcccggcagtgcatcgaacgaaggaaacgaataccacctgcaatccttattctcgtgtaaaaccattaccagtcttcttcctcgaaattatcgtcgcccggctcgtcgccactttcgtcacgttccaaacccgtatcaaagttatcttcctcctcgacccgatggcgctcatcgagattacgatgggtcagtgtcatcacccggttttcctcatcgttcaactcacgccacaacacatctttcaactcggtaataccctgtcccgtcaccgatgagataaatacgacaggcacatcgggcaaatcgtccttcatcgcctcgatcaactcgtcgtcgagcatatcgcacttggtcacggcaagcacccgctgtttatcctgcaaatcgggattgaaagcggtaagttcgcgaagcaaaatatcatactctttgcgaatactatcggtatccgctggaaccataaacaacaatacggcattgcgttccacatgcctgaggaaacgcaatccaagcccctttccttcgctcgctccctctataattccgggtatatcggccatgacaaacgaccgattatctcgataggatacgatacccaaattcggttcgagagtagtaaaaggataatcggctattttaggacgagccgccgaaatcgtagataacaatgtcgatttacccgcattgggaaatcctaccaatcctatatcggcaagcaatttcaactccaaaataacagtgcgctccacggccggttctccgggctgggcatatcttggggtctgattggtcgccgatttgaaatgccagtttcccaaaccgccacggccgcctttcaaaagaactacttcctcaccgtcttgtgtaacctcacacaaaaactcacccgtattggcatcgaaaaccgccgtaccacaaggaacctctatggtcttatcttcaccgtctttaccgaaacttctgttcgccccgccgggtgaaccgttaccggcaagtacgtgacgagagtatttcagatgcaacaaagtccacaaattacggttagctcgtaaataaacatttcctccccgaccgccgtcaccgccgtcaggaccgcccttaggcacatatttggcccggtacaaatgcatagcaccggctccgcccttacccgaacgacaaagtattttcacgtagtctacaaaattcgactctgccataattgatttattatttttcttttggattaaacgatacaaaaatagttattatgcaaacaaccctaagtggacacatattgcaaaaatagctataataagtgaaattataaaatcccaagccaaacggaatgaaatatagcgagaatcgatttttacagattataaaatagttaacatcgataatacgcggctctataagaataataaatatttctatttttggactttttcactatccgggttcggaaatagtttcagattgtattaatattattatctttgcggcatacttattagataatttgaattattatgaagaaaattgttactctttttgtcgcaatagcggcattttgcgggttcgcttcaaaagcagaagaagccactactttcgaagtgaacagaattaagtacaccgtaaccggagaaaattcggtaggtgtctcgggattaaacgaaaattatgaacccggagaggtaaaacttaccgaagtaattattccttccacggtcgaaaatgccgggaaaaactataccgtcacttcggtcgaggagtacgcttttcggtggacatcgggcattctgaaaatagaacttcccaataccgttaccgagctaaaaaacaacgccatctattacaacgatgatttggaagaaatcgttttgtcggaaaacattacaaaattaggagaatactctttggcatcgaaccgtaaactgaaaagccttgccattcccgccggagtaaccgaaattcctcaaagctgttttgccagcgacgaaggattgacgagcattactttcgccagcgattttacatctattggcaacggtgctttttacaaagccggtatggccgaaataacgattccgggaagttgtaaaacaatcggcaacaacgccttccaactctgtccgaacttatccaaagtaacattgggcgaaggggttgaaacgctgaacgaaggagctttccgtgaatgtgcaaagctcacggaaatcaatcttccggcgagtcttaaaacaatcggacaatatgccttcctcaacgatgtaatgctctcgtctgtaagaattcctgttggggtaaccgaaataggaaatgccgctttctcgaatgtcggtgtcacagcttttgaagtagaaaccggcaataccgcttgtcaagccataaacggagttttgtattcggcagaaggaaatatcctcttggcgtatcctctgaatgcgacagccacagaatacacgattgccgacggttgcttgggtgtaggagaaggagcattcgctcataccactcttcaaaaagtaatcgtacccgaagggatgcgagcttttgatgacaatgcattctccgaatcttctcttgccgaaatcaattttcccgaatctttggtattattcggtaatcaagcttttgcaaaaacccagctgacaacagttgttctcccagaaaacatgacaaacgtatatgagggtacattcgctcaatccacaaaacttcaatcgttaacgattccctctgggattcgcaccattgagtcgtatgccttcaatgggtgcactgcgcttaccgaaatacattgtttaggagcggaaccggccacactgaactattacgaaggttatgaccaccctttcaatggtatcgatgcctcacaagtgaaagtctatgttccgaaaggatttaaatcggcctacgaatcctctgagtggggataccaattcgacaatatcatcgaatcaaatacaggtattttcctacaagaaagtaccaacccggccaacgacgccgaaatggaatcgatcgggactattgaaatcactttccccgagaatgcctctcttgtagaacaatttccttcggtaaaagtagttaaaggacaagagctatacggagaaccggtagaaaacgcaggcggttggatggcattcgccagtggtaaaaaagtaaatgtattccctgccgacgaatatcaggaaggtccacaacccattcctatggaagacggtgtagactattacgtcaccataccggccggaatagtaaaaaatgccgaaggttctttgaatcagaaaatcgtccttcacttcgtcggtaaaatcgaaagcggcgtagaccagatagaaagtaacgactgctttgttacaaataacaacggtacgctcaatatcgtattaggaaacttaaccgattgtacggtcgaactgtttaatgctactggaaaccttatcaacagcattagtcatgcacaaggaacagcgactcttcatgtcgaatctaacggactctatattattcgtatcgtatcgggcgacacgataaaaactttcaaaatcgtaaaataaaacagcattataaaataaaggagcgatattcaaatcgctcctttattttattacaccattccttttatactagtttctatacaaattctcaataataatttatacgctgtaataaatgaggattctgatatataaatttctctatttgatctctatatttcaataatattcccaaaccttcttcgacctgcatcgctgcttcaaactgcatttcttgcaattgatctttccgtatatacgttttatagagcatgatagtatccgaaattctttctccaaagagtatacctttttctgtaattcctaagtgattattcgttaacttctccgtagggaaaggaatactacatatattcccgttatttttaaaaaattcttttattacttcttttttatccaacgacacatcatacaattctcgctctcgataacggtcaaataaatgcgatgtaaaaaatgcatattcattatccaaaactccaccccgtgtcaacaacatatatcctttactattcctataaagtaaataaacctgtacataaggatgatttcccattttttgaaactccttccacccatgagagtatggaataacacaaaatgttgtaaaatcatcaattttatatattaattgtgtaaaccaaacattctctgctcttttatttctaataaaataacgacgtatcttattacagtctactctatcttttatacgttcctccatagaagaatggattctatcataccatacacccttataatctcttcaaagctcattgtttccactatcataacccaacgaataagattctaaaaccagctttattttctctttttccatatcttttaaatgacgagagggagtaaacgtagttacgctctccctcgtacatatctctttccaaaaagaaattataattccgatataaccgacttaatagatttgaaaatatcatcgacactacccataccctgtatagcgcgatattttttctctttttgataaaaatccttcaacggttttgtctgattgtgatacacatcgagccgcttttgtattgtttccaagttgtcatcgctacggcccgatacttgtccccgcttcaacaaacggtcgatcaattctttctcctccacttcaagccccaagacaacatctacttgggcattgcgttcggcaagcatccgagtcaatgcctcggcctgagcgatagtccgaggaaaaccatcgaatataacccctttcttggattcctcatgagaatcgagcacatgcgccaaaatatccaccatcaactcgtcaggaatcaactgccccttagaaatatacgaatcggcggtttttcccaattcagtaccccgggctatctgttcacgcaatacatctccagtagaaatatgaaacagcccatattcttcgataattctctcgctctgagttccctttcccgaacccggagcgccaaaaataactacattcaacattttaccttatattaacctattaaacctcttatttcttattccgataccacataaatatcctttaaattacgcccctgctcatcgtaatcgagaccataccctactataaaagcaggaggaatttcaagagctacataatcgggcttcacatcacatttcaaagaatcgggtttaaacagcaacgtggcaacctttatctctttcggattatgagagttcaattgctgcaataactgttgaatggtaaaacccgtatcgacaatatcttctaccacaactaccgtacgaccggtgatatcttgctgtaacccatatatttgcttcacctctccggtcgagtgcataccctcgtacgacttcattcggataaacgatatttcggaatcgatagtcatttcacgaaaaagatcggctgcaaaaacaaatgcgccgttcaacacacataaaaaaagtggattcttaccggccaggtcttgattcattttcgaagcgatacgtcccactgccgccgctatttcgtcccgtgaaatatacggagtgaaaaaacggtctttaatctgaatttttgtgttcattggtgttatactgaatgtttcgcaaaggtataataaatcgtaaaaacttggaaacgataatctatatttttacagaatcgccccccgatcatcattcgccccgacaaaatgtaccatttccttttttctcactatatttgcaaataagatgcggttcgacaagtcaagtcggaaatataatttccgcttgcctttgcactcaccttttgctatatttgaccttatcaaaagactccattgagatgaaaatatttacgacccagtcaaccaagctactcgaccgattaaccatagaatacgaaccggtatcttccatcgatttaatggaacgagcagccgaagctctcacttccgaaatatgtaatacgatttctccttcccaacgtatctatatttttgccggtccgggaaacaatggaggagacgcattagccaccgcccgattgttaattgaccggggatataaacccgtcgtatatcttttcaacacaatgcccaaccatcgtttatcggcagattgtgaacagaatcgagaacgcctgaggagaactggtcataacgatttctttgaaataaccaaccaatttacaccgccggttgtcaattccggcgactgcgtgatagacggcctcttcggggccgggttgaaagaacccttgacaggaggattcgcatctttggtacgctatatcaatgaatcgggggcttttgtcatttccattgacattccgtccggattattcggcgaatggaatcccgaagcatcagaagaccgtattgtcaaagctcgattaaccctctcattccaaatgcccaaattggctttcttttttgctgaaaacgcaaaatttacaggggaaaccaaaatactcgatatacgccttcaccctcgcgccatcgccgaaaccgaaacttgttattacctaacgacagcagaaaatatagctcgtaacatacgacattcccgacccaagttttcggataaacgggattacggacatctgctattggctgccgggcaatacgccatgatgggcgctgccgtattatcggcaaaagcagcgttacatagtggagtcggattagtctcggtacactcgcctcgatgtgccaatctcattctgcaaacggctgtacccgaagcaattttctctcccgacaaaggagagaaccatatcgaagaaattcctgtccacccccgttactcggcaattgcaatcggaccgggaatggggtgtaacgaaacgtccgtatcggcgctcatgcatttagtcaaagaaatacgccagccactcgtgctcgatgccgacgccttgaactgcattgcccgtgaacaaagccttttaagatatctgccgtcccataccatactcacaccgcacattcacgaactcgaacgcatgttcggccccatgaccgacgatgcttctcgactgaaatgtatcacacacgtagccacgaaatacgatataatcgtcgtcttgaaaggggcgaataccgccatagctttgcccgacggaaccatacatttcaactcgaccgggaatcccggaatggcgacagccggcagtggagacgtgctcacagggataatcggctctttactgtcacaaggatactctcccgaagatgccgccatcataggcgtgtacctccacggagttgccggagacatagctgctcgggagtcgggagaagaatacattacagccagtgatattatcaatcacctcggactggctttcaagcagataaaatcctatcaggtatgatagaatgtcaaaacattttatatctttgcatgagatgcgaaaataggaagccttcggtatagccgaatatttttaaattcgcttctgactcgtattattttatttcataacatcatcaagagaatcaaatgaaatattttattctaactctcggactgttccttacgacgaacatcggatttgcccaagaaacaaaaagactcactgccgaaaagcataacgagtacggacttatatactctctcccgcaaacacatctcgatatagaagtggttgccacaaaaacgacacgcaaagccggcccttattaccaatatgccgaaaaatatttgggaataccgggagccattacacaagactccgaagaatgggcgttatcttccgtcaaagttacaccctatggagtacccgatcccgaagaacaatatctgatgcaattcaaaccgggcggtaatggatatatcgtcttagatgaaaacggacttctgctatccatcaacaccgaaccggtcatcgattcgatcgtctccactgcaccgaaacaaaaacaggaatcgccgttagacaacaacgaatatgcaaaagtctactccgaagaactactcatgtcggcttcaacggtaaaaatggccgaagtggcagccaaacaattataccgtatccgagagagccgcctcaatttggtaaccggtgaagtcgatgaattaccggccgacggagaatcgttcaaacttatcatacaacaactcgatgaacaggaggctgctctcacggcattgttcatggggacaacgcaaaccgagacaatcatcaaacatttcgattatatccccgttgaagaagttacaaacgacatcgttttccgtatttcggatttatatggaatcgtaaagccggaaaatctcagtggagcccccgtatatttatctctgaaaatcaccgaagaaggagagctacccatcgataacaaagggaacataaaaaaaatgcccaaaaacgccgtagcgtatgctattccggggaaagcagaagtaatactttccgacggtaaaaaaacgcttttcaaagagaatttaccaatcgcacaattcggtgtcgtattcggattggatccttctatattcaccgataaaaaagccccttcttgtgcgacattctatccgcaaacaggagctatccggcaaataggcaaataatatgcttttaccatacatgaaaagtgggttggcagaagccggttgcgacgaagcaggacgaggctgtctggcaggttcggtatatgcagccgccgtaatattaccgccgcactttcgaaacgaattattaaacgattcaaagcaattatccgaaaagcaacgttacgagttgcgtcccattatcgaacaagaagccgtagcatgggccatcggtatcgtcacccccgaagaaatcgaccgcatcaatattctcaatgcttcgtttctggccatgcaccgggctatcgaacaactgaatccgcaaccgcagcatcttttaatcgacggtaaccgattcaaaccataccccgacattccccatacttgcgtcgtaaaaggagacggtaaatacgaagccattgccgcagcctccattttagcgaaaacatatcgagacgactatatgaaccgattgcatgaacaatatcccatgtatgactggaatcggaacaaaggatatcccacaaaagtccatcgtgccgccatacgccaatatggacctacaccctaccatcgcatgtcctttcaactgcttgaaaggcaactctcgattttttaaatgcaatcatctctatacaaaaaccgccgatattaatcggcggttttctattctcatcttcaaaaggggaaaaatcatctcttcatgatttttttcgtcgatacctttccttgatcggtcactactctcaaataataaataccagtcggataagaggacatatccactgtaaaaagattatccgaaacatatacttgacgaccggttccgtcaaatatttctatcttctgaatatcgacaccctccacatacaaaatatcgcttacgggattaggataaatacggaccgacaaatcatcaacaacttttgtaatacccgaacttgcatcggtaaacaacattttaacatcgggccacatggtacttccagaatacccaataggaactgcattcggatctaacacctcactgtcatcaaaagcagaataaaagcgcgaacgttgcggatcactgtcataaaagccatacgtacctttgaacgatatatcgtatgacgtagaacccggattacctttaagaataagaataaccaaattccctcccttatacgaataaggggtagtcagctggaatatccactcttcgtcgccgggtgtgacagaagcggttccatcgaacaccaaagtcatctcatcggccggaatagaagtctcggacaaatcctccaactcggtctcacctacccatattttcacaggaatattcgagtagcttgttcctaccgaagagaatcgatacgatatcatctgcaaagtaccgcttttcagtcctacctcgtctttataataaatggtctcaccaatcgactcacccgtcatgaacgacaccgggaggaccgagatttcttcatcatgatcacctatcgaaataaattggctgccctcttcaagtactgaaaccgatagctcctcggaactgttattcgttttatcatcgtcaccggcatattcaatctccgcatgaattttgatatcacccgattcggaagacgtgaatttcatatcgaatacaatactctgcattgtcccgatttcgactccgtccatttctgccaataccgagcctgcggcatccaataattttactttatagtctgttgcagcgactttgtccacccctttattccttatcgtgaatgcataaatcgtttcagactctgctccgggatacaaatctcccttcaatgataccgccataagatcgtgcgtttttttctcagttacggttacatcggcttcccaaccttcgtctcgactcataacatcggagtaaaaaacaaaggtgagagctccgtcgatactggtcgattccaaagaaaccaaagcagaaggaacagaagtagatgtaaattctccaatcaacggcgcattggtgtcagccccatcgaaaatatacaaataatcgccatacgtatccgtcacaaattgcttgaacgagacatgcaccaaaccgttagagttttgagggcgtatcgtaagcgtatcgttccgagtgttcggataataggcattcggtccagcagcatcataaaaatgataagtttttccgctctcaacgatagcctcaccgtttgtcattacaatccagtcagccggtttcacaataatcggagcggcaatagacacagctccatttcccatatcgtttactgcataaatcgaataagtataagttccgaatcccggagtatcggtataagacgtagccgatggatcggatatttctatttcattcgaagcagaaccattggaacgagtgataacatatttcgtaatactacccggatcaaatgtcccgccatacataccttctccgggagctttccacgtcaatatagcctcgttatctccttgtttcaccacaaaatcgaccacctttcccggtgcattttcccctacataagtagaaacatcatcgctatcgactccaccatcgcctttggaatttacgggaacaaaccgataactatataatccgtcttgtagattctcatcggtatattccatagattgtcctgtcttatcggacgaaacggtcacggttgtcaccaactcttctcctcgataaatctttattcctgtaagttcggtcaaggctttaccttgtgcatcaaatgaaggattcctccacgaaagaatagccgaattgcccgaagctaccaccttacggtccaaaactctgtccggcgctccgacagggacatggatataaggaataaacatacttgccatactgtcatcgccatttttacccacaccaccaataacagtggccgcaccagttgttatatcgaccgtatagagcttgtagtcgccacaattcagccaatacaaaattcctgtatttcgatcgaaatccatactttgagtaaaagccgcattcactccggtagctccgatcaatgtacaggcggctgtggctttatctatacgatagagattatcgtcggtagaaataccatacatcgtcccatcgacatggcaagccaatgccaacatataaacagacattgtcgaagtttggaatgctcctatctgcttcgtctctccggtattaaggtcaagagtcatcaaatattcggctccatttttaataccatacatggtgttcgtcgtgtaatcatacgtcatttctaccaaatggactccattagtagaaataagagtgcgtgtaccatcgttcatatcaacagtatatagaccttccaacgacgattgtgtacccggttttgtcacctgcgcataccatttataattaaaataagtacctgcataaacagcccccagagtggattgatcggctatgagttctacaactcccagattatccgacgaaaatttcaccgggcctttttgtacattgacaggattgctttgttgccaatttcgataagcataaatagttgtctgcgcttgaagcgagctaacgacgcaaaaacacagggaaattagggcgtaaattttctccataaataataaaatattagtttagcgattaaaattattttattccaatacaaaaatacggattaattataataattttaaagcaatcttcgttacattcttatattttattattagctataattcaatcgattaagtaaaacatgcgttactcaacgcaacgataactacaattttatctcttggaaaagttcctctacggtaatatacttatgcatcttgtcattgattcgtttacgcaaaactctaatggcagaaaccgagacactgcgacaagcagcacattccttagtattcaatccaagagaacttagacaaaagaaataaaactcctcgtcggagaatgaaaaataagcagtaagaagttgataaagtaacgcatactcttgacgtaaggatttaaatagcctgtcccgcaacgatattgtaaggaaaacatttcctccttcgatatattcggttacctccttaaaaaattccgatttcacaaatcgtttgtttttctgtgctgtaatctctcctatccgttctacgatctcccgttgcaatgcctctgttcgtttttctatttccgtagaagtttcccgattattttcttcctcgacttcgatgtgttgtttattcgggataattttccttctaaaaaaataaaacagaaaaatactcactaaaacgacaacaacggctgtacaaactatacttaataaggttcggtcatgtattcttcgggaatattccacattcatattgtttatcaactcaccgtaaaatgccgaattgacctttgctggttttaccattccagcgatggaatcgcataacgaatgatacaacccgagatatacactatcgccagtcatagcatacaagttctcataggccgaagtcttcgtatagatataattactacgagctgcctttttcgtgtaataaatagcagagtcaatatttctttctccacaaaagatactacctcttaccaaacaacttttatagaataatactgaatcacgacaaagaggtctgatttcagaattatatttcattgcagaagcataatctcccgatatcagaaaatagtaagaaagtgcatttttagttttataaagttcttcctcactctcaatttggggaatcaactcgattgtttttaaaagagttgtatcaatacctccctccttatctacatagtaacatttccataagccacgataagactcagaaagctgacttttatccgaaagcatggaattgaatgtaatagcctttcggaacattttttcggcctcctcatttatattgcttttaaaaagcaacaaagcaatccgattatagtaagcccccaaagcatcaaagtctgatattcgactggaatccaagctactaattgcagacaaataataaacggccgccgaatcgaacatatttttatcctcgaaagctacccccttctcaaaataagtcgaagccttatccgcctctactactctgcctgcacaagaaaacaacagaataaaaagggaaaataccgatatgtaatgaattagcctcaacatcttttaagaaccataaattacccttcttgcaaatttagagaaaatatccaaccttacaaacagtgatacccgtctcacccttaataaaatcacaaaaacacagggctcccgtttccgagagccctaaatatatcatattatagaaaagacaaaccgactattcggccactctctccaaccatttaagcatacctaacattacacccatcgatatcaaacatacggcaaagaacactgcccagcattgccaaataggccaagcgttgtacataaggggaccaatccacaacaacaaattgcctaatgcagtcgctcctaaccacaaaccctgacaaagtcccaacaaatgtttgggagccactttggatacaaacgacaaaccgagaggcgagatgaacaactcggctaccgtcaagaagaagtaagttacgataagtacccaccaatgtgctttctgagacatttgctcagcgaccgggagaagtttgaaatcgtcggcagaaggataaccttttaatactgaatagatcaccaagaataagaatgccaatccggcgataaacataccgatagcaatcttacggggtgtcgatatttcttttccccgacggctcaaccaagcgaacaaagccataacaataggggtaagcgtaataacgaagaaaggattgattgcctgccaaatctccggagcaactgcgctcgaatctacaaaatcgcgtgcaaagaaagaaagagacataccattttggtggaacgagaaccaaaagaaaataacgatacccaaaacggcgaacaaggcagccatacgttgtttgatttctttggccattgcccgtttctcctcggcggtatacgattgggactccactttggtctttttgcccggagtaggaaaacgtctctggtaagcgacaaaaattatcaaagagataaccatagcgacaaccgacgctataaacgaatagtgaataccctcgttaaaaatttgaagatagttttgacaagcactcgtcagttctgccacgttaccgcccgctgccgtcataagggcattaaggttatccaatgcagcctgactcatttgggttccattgttaatgaactcgtggcaaagtgccggaagttgggcattataggccattccgttcgctcccaaccaccattctcgcaaaaggggcgcaataaaaggagcaatcaaaccacccacattaataaatacataaaaaatttggaatccgctatcccgtttgcttttcgcaatcttcaaagcctcatgaccttgttttgcagcctctgcctcaaaatcgtcatacaactgccccacaatagcctgcaaatttcccttaaacaaaccattaccaaaagctatcataaacaatgcaaaacaggtaagcggaagcaaccaagctatattcgtactcgttgctaaaatcggaatagacagcagcacataacccgttgccatgattatcaatccggttcgaatcgttcctttgtaattctgggtacggtcggcgatagcacctcccaccaaagccaacaaataaatacccgcataaaagaatgaatatatagtacccgatgtctcctcgcttagtccgaatttagaacaaagaaacaataccaatacagcattcataatgtagtagccgaaacgctcgcccatattcgcaagagccgccgcaatcaaccccttaggatgtcctttaaacataataacagattttaagtattaaatgaattaattgtttttcactttaaaagccaaagcatacatgcgcatttgtttaaccatagccacaagcccgttcgagcgagtcggcgataaatgctcgttcaaccctattctgtcgataaaataaagatgagcattcaagatctcatcgggagtatggccggataaaacccgtaccaacaacgaaactatccccttcacgataatcgcatcgctctccgcttcaaaataaacggaaccctctctataatcggcctgcaaccatacccggctctggcaaccttcgattaaattttcgggagtcttatatttctcgtccaaagtaggaagggcattgcccaaatcgatcagcaacgcatatttgtccatccaatcgtcgaataccgaaaactcctctataatctcgtcttgtatttcgtcgatacttttcatattattcatttttcaatcattcttcataaagaaccgtcaacacggtctggcctacggctttcaacgtcgaccgatctatatttctcattgtatcgtctaccgtatgccaataaggaggaaaacccgtctctgtatctcgatgacatggaataatatcgatactgggtattccataacggtttacatacaaatggtcatcggtaacatatccgccgtcctcctcgataaaatagtttccgtaccccaatcgcttcgccgtatcccatacttgcgccacaattccggaagcataatacttcgaaaataactctcgtcgaaattgtgccccggctccgcccaccatatcgagtaagatcccgaatcgggcccgatatcccggcttatgaggccgacgtgtccaatactgtgtgcccaatgcccatgtgttttcgtcgctcgactcgctccaatagggaacaccgtaatcctcggcatcgaaaaaggctatatcgacacccgtgtcgggctgtctcttccctatctgacgagctatttcaagcaatacgcccactccgctcgcaccatcgtcggctccggcgataggctgacgatgtttactcttatccgggtcgttatcggcgtatggacgagaatcccaatgagcgaacaataaaatgcgatttttcttttcaggagaaaacgaacctatgatattccgtatagaaagctctgtcccgtcataagccgtaaccgttccttgctgcacttctacgacagcgccatgccgagccaactcggaagataaataatcggccgttgccaaatgtgccggagtgttgggcactctgaaaccgaactgcacttgacgttcgatataagcataagcactatccgtatcaaaagaaggaacctctatcgacacgctatccgtatccttttcctcgctattttttaccgactttgcagaacaagcgaccaacccgacaattaaaattaaatacccggccttacggtttactgttttcatcatgctcaaaaataaacattctgataaaaactcgcaaatatcccggctattttatacaaaaagataaatccaccgaccgctcaccgacagaaaacacgacatctgccccctcgatcatcggcaaattatccgagacatgccccaccggaaaatcgaaacataccggataatcatactcatcgaccattttacgaatcaactcatacaatgtaccacccagaccttcgttctcggtatactcggtaaacctacccacgatcaatcccgacaacgaagccaaacgaccggacagtttcaagttataaagcatgcgttctattttgtaaggaggctcggctatatcttctataaacaaaaccgttccaggcaaaaatatatcatacggagtagaaatcaatccgcacaaaaccgccatatttccacccaccaacattccccgtccctcgccgcaacggttcaacgggtgaggattttccttgtattcgggaatttctccgaataaaatttgccgtaaatagtgcgtacaacgattatccgccggctcggtagtcaaatgcttgcacatgggagcatgcaacgacatcaccccacggctcacacagagagcatgcaaagccgatatgtcgctgaatccgataacccacttcggattccgagcaatatcatcggtcaatccgtccaacaaatgaacagccccatatccgccacggctgcacaagacagccttcacagcaggatcgtacaacgcatggcggaaatcgttcattcgttcatctatcgtccccgaataaacgcccgaatgatccagacagtgagaagaaacagtcacaccgagcgaccaactttccaaaacgccggtcgcccctttcacataatcgggattgataatactcgcaggcgaaacaatggaaacgctatcgccggggcataaaaattgaggtctgtacatcatcaaaaatccaatattttaaatcgtttcttatccgactcctgtacataatgttgataatgccaccattcattaggaagcggataaagctcttgttctcgcatgactgcatacaaaaatcgtcgattgtgataagccgcctcgcttatcctacctgtcttcaataaataatcgtcgtcgaccgtatgcgcttcttctccaaaaaaatcatacggactgcccatgtccaatgcgacgccatcgctaccgagtatcgataaatcgacagccatgccgtaattatggaagcctccctcattgtaaggattagccacatactgctcttgcggtgtacctcgcactcgctcgaacattctgcgctgtatgcttaacggacgggcggcatcgtaaatcaccaacctatatcccggctttaactcctgtaaccgggcatgtacccgggccagccgtgaaatcatatgaggcaatagataggcttttctcaaatcgggatataaaatttcacccataaaattatcggccgtagcgtatttcaaatctacgaccacatcgggaatggcagtttgaatatcgaccaaccccgcctgctcgaaatattcctcatagttgatcaccatacggctgtaaatccattattgggtaataaaatctcattattgttttctccgtgcctaaacgagtatctgttatgtccatacgactctatccgataattatcggtaaaacttactaaatgaagctcttccttagaggaaggtaaagaaatagacacatcggcatggcgcgtgagctcgggcactttaaagtagaattcccgtcgtaatgtaggataagaacattttatcttagcatcgaaatatacatactccccatcgatacataatactctgtcgggaatatcagaggtaagtttgatacctattgttgccgaattttccaacttcacgagctccacttctatgtctcttacgcaaattggaacatttcccaaataaaattctaccgaatagttcaataaagaaactgcattttcaacattcaacgactcaataaaagaaagacacgacaattcttctctcaaaaagaaaacctcgccttgctctttctggaagaaaggattctcattaaaagcaaaaaagcatgaaaatttggtcaacttattctccgttcctttcttcaaatatttcttataacgcaaagattgcgatatgcaaaatccagcatctttacatctcatgtactgtccagcctcatcgtagagttcgtcttttcgattaggaataatttgaatatcatataccatatcgtctctgtatgacgggttctttaagatagacgaaaataccccctgcatattcttcgctaaaagactacctagcaatcgctcgctacaattattcacgacatcaatcacttctttggaatcatacttctgaataatatccaattcagcgcccaacgatttaacaatactatcatcgacctcatttcgaaactcttccttcactcgttgttgctgacgatccaaaagaggttttatctcttcgactatactctgggcagaggttcttttcgtaagtaactgataggttaacgtaaacaagaaaaatgcaatagtcgtacttataatagacgttaacaaatcgtacaaaaatccctcctgcattttccatgcctcacaaataaaacctattacggcggcagccaatgcgacagcaatgataaaaagggcataccaataacgctccatcacattccggaatttactttctcccttatcctccatatataaaaacttctaaataattaaaatcaagactctactattcacaaaaatagcaatctttcaatagtatttaaaatatctgtcccgaaatctgtgagacttcgggacaaacgacaaaagctataaacagttttatttttctcgcatgaaaatattgatgggtgtaccgctgaaattccaattctcccgtatcttgttttcgagataccgtttgtacgggtctttcacccattgcggcaaattacaaaagaacacgaacgtggggacgtaagtctcccgcaacatggtcacatattttatttttacatacttgcctttatgtgcaggaggcggataattttctatcgcactcagcaacacttcgtttaatttcgaagtaggtatcttggtatgccggttcttataaacctgcacggcgttctccaaaactttataaatacgttgcttagtcaacgccgaagcatagacaatgggaaaatcgacaaaaggagcaagacgtgcccgtatggcattttcgaaagtttgaatagccttgttcgatttatcttctaccaaatcccacttgttgacacaaaccaccaaaccctttttatttttctgtatcaacgaaaagatattcaaatcctgtccttcgatacctcttgtagcatcgatcatcaaaatacaaacatcagaggcttcgatagctcgtatggagcgaatcaccgaataatattcgagatcttcggtaaccttccctttcttacgaatgccggccgtatctaccaaataaaaattgaatccgaatttatcgtatcgggtataaatcgaatcgcgagtcgtaccggcaatatcggtaacaatataccggtcttcgccaataaacgcattgatgatagaagactttccggcattagggcgtcccaccaccgcaaaacgaggaatgttttcctctatctcgggttccgattttttggtaaaacgtttcaatatctcgtccagcaaatcgcccgttcccgaaccgctggctgccgacacacaaaaaggatcgcccagcccgaacgaataaaattcggcggcgttatactgccactcgttcgaatcagctttattcgctaccaaaatcaccggtttatccgaacggcgcaatatagctgccacatggtcgtcgaggtctaccgcgccggttttcacatcgaccatgaacaaaataacatcggcttcctcaatggccaaagctacttgtttgttaatctcttcctcaaaaatatcttccgagttaacaacccaacctccggtatcgataacagagaattcctgaccgcaccactcgaccttaccgtattgtcgatcccgtgtcgtaccggcttcttcgttgacaatcgctttacgagtttgagtcagacgattgaaaagagtcgattttcccacattcgggcgtcctactatcgctactatatttcccataattccactttctttttacggctctcacagcctttatttcttaatcttttattcaggtatatacccgaaacctttcaatttattttcccgactacgccaatctttctccacttttacatacagttcgagaaaaacttttttgtcaaaaaacacttcgatatctttccgggccaaagtccctaccttcttcaaagccgaaccgcctttcccgataacaattcctttctgagaatctcgctccacatagataacagccataatatgaatacgattctcttcttcatggaattgttctaccgccacctcacaagcatacggaatctctttatcgtacgtctgcaatattttctcacggataatttccgttacgaagaaacgagccggcttatcggtcaaagcatctttctcgaaaaacggaggtgacggaggtagtaattcctgaatacgcttcaacaaatagtcgaggttaaatttatattgtgccgaaaccggtataatctcggcattcggcaacaactgtttccactcctctaccaacgtttcaagaacgctctgctctttcagcaaatcgaccttgttgataactaccaatacaggaaccgtctcccgagccaccttgtcgaggaacgattggtttttcgcaggagcttccaccacatcggtcacataaagcaaaatatcggcatcgagtaatgccgactgagaaaaattcagcatcgactcctgcaacttataattagggacaagaactcccggagtatcggaatagacgatctgcatatcctcggtattcactattcccataattctatgacgagttgtctgtgccttcgacgtaataatcgaaattcgttctccgaccagtgaattcatcaacgtagacttacctacattgggattcccgacaatatttacaaatccggccttatgcataattctgttttattcggttacaagtcaataacttctgaatacaaaagtagtgaaaatattctacccaacgaaacaacctataatcgcttttgttcgaaaacaagaaaagacgcatctctttcgccaaaagatgcgtctttcttatatctcgacaaatttattttgcgtcgtatccccaaatgagataaagagctccccatgtaaatcctgcgccaaaagccgtgaggacaagtttatctccttttttgaatttatgctcaaattcggccatacacaaggggatagacgatgcactcgtattcccgtacttttgaatattgaccaataatttttcttccggcagctttatacgatcggcaatagcctctataatacgcaaatttgcttgatgaggaataaaataatcgatcgtatctacggacaaaccattgcgagccatcacgctttccgaagaagtgagcatatcggttaccgcatgcttatataccgcccgaccttcctgataaacaaaatgttcatcatgatctaccgtctcgtgcgaagccggatgaacagcgccaccggctttcatcagcaaatgaggcagtcccataccatcggtatgcaacacggcatccttcactccgacttcctcgtcggtaggttctaacataacgcaagccgcagcatcaccgaacagtggacaagtagaacggtccttatagttaaccatcgacgacatcttttctgccgccaaaacaaccacatgcttatacagtccgctctttatataggcagttcctgcttgcaaagcaacgataaaccctgcacaagcggcttgtatatcatacccataagctgtttttatccccaatttttccaatacgatcgatgccgtagaagggaaacgataatcgggattcgacgtagcacaaatgagtaaatccacttcactgggctttactcctgtttttttcaacaattcggcgactgcttttacacccaaatcggaagatcccgttccttctccttttaaaattctacgttctttaatacctacacgagtagtaatccactcgtcgttggtatcaaccatatgcgacaactcgtcgtttgtcaaaacataatcgggaacatacgaggcaattcccgttatttttgcattctgcataataataaaatcggcttagtgtgtgaaaaaatgccctaaatcgctttagggccatacatacttatcgataagagcttaaacagcagcttctttttcgattgccaattttcctctgtaataaccacactctccacatacagtatggtatacatgccaagcaccacagttaggacaaactgccaaagttggagccacagctttatcatgagttcttcttttggctgttctcgttttcgattgttttcttttaggatgtgccatttttctattactttaattattatctattattttctttaattcgtcccatctcgggtcagtttcctccccttcgccgggcacttcatctacaacatcttcatcatcgtatgatgcggcatcttcactttcgtcgctatcgtccatagaacgcgccgcatgtttacgcaatttagcactcatcgatttattgcattttcctgcctgatgaacatgcttcaaaggtattgtcagtgcaatgaactcatataaaaaccatgcaatattcaattccccgtcactttcaggaataacaaccacattatcgctctcctcgctgtattccgaaccgaatttcacatagagcgtttcttgggtttttacctcatggtccatatcgtccaaacagcgatcgcacggaatttgaataactccttccaaatcaaaatccagttcgaaagaagccgccgtccgcttcactgtcaatttcaccttcacctttcctttttgaacatcttcaccttcgatattcttaaagaactcattatccaatacatactcaaaatcctgagtacctatcggcatacttttgagcggtaatttataagcactaaatcgtcccaatgctatttgtcgttaaaactccgcaaaggtataaaaaataatcgttacaagtcaatcttttcggtagtttttatttcacattcacaatttttcaaatggagagccataatcgattagccccgacaacattcaaaaaaaaaaagattttccagcccgactaaacgactcgcttcaattcgattctgaatgtcgtaccttttcctacttccgaatctttcacataaatgcgtccggcatgataatcctctataatacgttttgccaaagtaagtccaagtccccaaccccgtttcttggtcgtgtaccccggattaaaaaccgttttgaaatttttccgtgcaatccccttgcccgtatcttttatatcgatataaatctgttgcttctccgatgtcatataaacatctatacgcccttccccattcatcgcatcgactgcattcttgcacaaattctctataacccattcaaataaagaaagacacaccatcgcaccctcggcatcagaagggagatgagtcgtaatcaatactttatcggaaactctgcgacgcatatattctgttgcattttcaagcacttcgttgacatatatcaattccatttctggcttcgagcctattttagaaaagcgttcggctatgacagacagacggttcacatctttattcatatccgacagtaacgagggatccacacccgacgattccaacaaatccatccatgccatcaacgacgaaataggagttcccaattggtgagcagtctccttcgataatcccacccacaccttattctgctcggcctttttcgtactaatcaacgcaaaataaacgattaaaacgaacaggaccataacacccaactgcacgtacggataaaaagatagccgctttaacaaaatagaatcgtcataatagagatactgtttctccccgtctcccaaattgatctctatcaaattggatttactttttaattgttccagtttctcttgtaaatatttctccgtatccgtttcgggcaaattcaaattaaggtactgatttatttcgccggtatcatcgacgataatcgccggtatggaggtattgctctgtatcactttcaatatcaactccatgctcatttcagtcttgtcactggccaattcacgcgtcgcttcggcccatatttccattttctttcgctcctcgatagacaagtcttctacaaggtcattcgagacataaagtaccccgccaaccagcaagacagaaatcaacaaaaaaatcagtttccctttttgtcgggcatcatagatattttgcataatatacactcagtattacatattatataaacggttccacgactcgaatattattcaacggcttcttaatgtaaaaaagaggagcctttcgttattcaaaagctcctctcttctcatacttttaccagcagtgtgctgactaacggacttgaacccggattgttcgattatctaccttcacaagataaacgcctctttccattggaattttctctgtatcactttctgactctatataaaagagcgtacgaccatcaatgccataaacagatatttttcttcctgtcaccccctcagccataatgcaaccgttcataccataaaccctgatgtcatttcggttcaactcatctactgccgatgttcccaaacgaacggtattcgagcggaacgattctcctttatcataaacaacagtgacatgataagctccatattcaatagacggagtagaataattcgtctcaacgataggagtttgagtcagtttctgtccattgcaataaacatgataccctacaaccgataaatcttttaccgccgataccggaacatacgacaaatcatcaactaataaagcgaacttatttgaactgatataatgaattgcaaaataacgggcattctctggtaactgataagaatattctttccaacctacattaagaaccgattccgtagcaagcaattcaaaggcatctacatcggtcgttgtcgtcgaataaagcacttcaaacgtctccggcgtatattccgttgtaggaatcgtagcatagaacgacacgtttgttcctcctataatttcaggagaaatcaagtagtcgtcattttgaggcgtcagaccgtcataactcaaaccagcccaagaaaccaaacatttttcaccagaatgaggcttccagttattcgaagtcacatcaacaccctcggccagaggttcccagacttgaaacgccatcggtgtacccatattcggaaattctacaaataaaataccggcagaggtcaagccatctccatctaccaccgtataatcacctatattctcataaataaacgattcgtaaccttcgaaatcatctaccatcggctcgggggtcaatgtaggctttgtccaagacagttcatgagccttctctgttttctccccgactaggtcggtaataacaggcaactctgattgagaagcgattattattgcctccaatatattattttctgggatctcatcagactcttttgctataacctctgctttaataggagtttctttgcctatcatttcagccgtaggagtaaccgtaaataaatgatcggctgtttctccctgcgccaaagcctccgtccgagaaagagtttgaaccagagtctcatctacataaagattcacatcataagttatcgactgcttcccgttatttttaacgacaaccgtataattttcagattcacccacgacaggacgacgaacacctttgatactttcgagtttcgcatcaaattccgactcattagcaactgccatattatcgatgattacataatcactaccattagaaacagctccatcaaacacaattgcaatccacggataatctttatattgagccaaatttactttgcatacggtccaacccggaagaaaagaggctgtattggcgctataaacctcggtatatgctttatcatcggcagtcactttcaccgataattttccggcagcattctggtaacgatataataaaaatgtcaatgtaggagcattaaaaccacccaaatttaatttggggacttgtaaacgagcttctcccttacccgattgagaatggcaaacgaacattcctccatcttccggctccaaaccgagactgcgaatataattcgtcaatccccactcggcttgtccgctcaatgcccccataatccaaggataagttgttgtcatattattcacaccgttttcctcgaaaggcatcgtataagggattcccaatacgacattatctaacgcagcctcgccttcgcccccgatagtagtagcagagacaaggaaagtataagaatcgagtttagaagaggacggagtagccgtataagaaagggctgtggtagttcccacttctctataactcgtacccacatactcataaatcttatacgtaatatcagatggctggaaataaccattatgcacaccaaccgtaggaacactccacgataactcggccttcaaattatcggaagagggtaaagctgtaaagttcgacacaatgcttggaacatcgataccgcaataacactttaccgtagctgttcctccttcactaaactcattcttggccaccacagtataaacgttatttccctgaaccgcattctcatcattacaagaaagaacttcgcctggttgtttacccgtaaattcagcgaccacaaacccgtcgacacgcttcacggtcacatcgaccgtaccagtcagctcttcaccgttcaagctttgagtaggcaaccggaaactcagcgttgccgaaagccccccttgtgcagcgggagtagcctttaattctgtaacagcggccggagctttcatcaacgaaccgttacgcacctctatattttttatattcaaggtaaattgatctggatcggaaattgcatggaatccgacataataacggccatgctctgtaacttcaaaggtagctgtaaaagtttgatattccttgttcgtcaaatcaaatgtctgagccttttgttgatcttccggcttatccgatttaccataagtcacttccaatttctcagaacccattacaccggccttagcgtcaaacacgacctctatcatatgggcggttcccaattcgatggccggcgttatgacataatcatcggccgaattcgaacaataagcatacttcaacgaaccgtcgcttatatcgtagtaccaagtattatcatcgttattattatccttgatcgtaaacaaagaaaactcctgttgagtcggtgctaccatataaggtaaagaataaataccgcagaataccgtttgttccacttttacaccggcattttctccactataagctacaacactatatgtgttaaacccaaagtccgaatgttcgtcttcatacgttaatgtcgctcccaaaaccggattttcaaacgttttgattaacttcccattacgcaagatttcaattttagaaacagacgaaagaggttctccttgataattttctttcggaacgacaaaactcattgtagctttctgtaatcctgcttgatctgccgtcaccacaaaatcggttacgcccttcggagcataaatacttccgaattcttccacacgaatattatctacattaactccaaaacgatcggcaacgcttgtacaatgaattgcaaaatttccttgcccgttcgcttctggcacgtaggtaagtacaatatgtctcggagaagacgcatccgccataatttccgtcggttccataacaatcgtagataacgattctacggaaggctccgctcccactttaacaccaataatttctgcattataccccgagcctgaacaaatatcgaacgaaagctgataaacattataagctttaaaagtcattttaggcaataccaaataatcatcagcagcattatcggcagagaaagtataacccgcactaaattgacccgtatcgaattgccaagtcacaccatcgccattattatcgattatgttcaacaaatcgaatgacgatgcatcttcgaaagtttgttcataaggaagcgaaacggctttcccaaaaacgaccgaattactctcgaccgacccacactcttctccgccgaacttcacgattacagtatacttgtaagactttaactcattctcgggaagattatcgatataagttgtctcttttatgtcggtcgataacgactctccattacgaagaatgtcatacgaaacttttgtcaagtttacccaacctccattaataccggcttcgggtaatgtccaagaaagggttactttcccagattcttcggcaacagcggtcacttcggttggaatttggggcatatcttctccggtaaaagtttttatcgaagctgcaaccccctctccgccactattcaaacaaattactttcaatacatgtaatccattcgttaatgcaagagatatagaaaattccgcaccgggactttggttttcctttatctggacagtatcgccatcgactactatggcgacatttaccaatcctttcagttcattaccaccggcagtctttgtaggaagatcgcacgaaattcgggctgtcgtcgcacccggagtcgcataggatatactcaaattttcagcagcagccggagcagaaggatcagaaaaaggatctgtcgtgtacaagccaatccactcctctccattgtcaaaagtcaattgcgtataaaactctttcgagaccggatctattacaatcaactcgctttcactccaattacaagcagcccaatagattttacgatcgagagggctccaacaacacgattgagaatattcagggaaaaaacctgtactcactactttctccccctgtacggcagactctttatcaaacttatatacatcgccataatcatcgattacatacatttgcccttctccatcgatacacattccccgataagaattttccattggagcgacaactgtaaaatccaatgtttggagatccaatttactcaacgtataagcctccccggcctcatcataattaattgaataaacaacatcattgaccggatcataggtcatattcaccgcagcattaggatattccgcctctttttctataacttgtttatcacctgtcacgacatctacgactactaattttgcagaattgatacccgaccagtaaaactcgtcaaaaaccgataaatagaattttccattagcgtaagttccaccgccttcgccttcaccatattcctctacgtcatacagcttagaataatctccggtattaggattaatcgagtagataccataatccctctcttcataactattagtagctgccaaaaagccgaacaaattcgccggtgaattttgtgcattaattttggcaacacgagtacgagccggcaacttagagatattaataattcccactggatttcgagacgagcgctttctatatttacgaacctgcgctttacctgatttaagaggtacactccgttctgtaaattgataattttcacgttctttcggaatagattccgaccctaaaactttggaagaaaaaaccattatacacataagcacaacgatccaacctccaaaaacctttaatttagtacttgataacttcataaaaacactacttaattatatattttgattccaaaataaacagctcttacaaatgctacacaataaatgatttgcctataaatagttccacaaaattttatgcaaaattaaatataatatatatactatataatacccacatttaggtattatgtatatataattttacaaaataaagcgacacaaatattttaaattataaaaaatttcattgtaaatcggacatcaatcataaaaataataaacgaaaaaaaacacttcatatcttccatctatacccattggttctattcagaacatatataatactattttgaaaatcaaatattacttcatcattaaacaataaactgttcaaaaaaatattaccctttaactcaatcatatcataatatttcaaatacccattctaattttgcataaaaaacatacaaacgataaaacaaaaacttaatactacctatcatgaaagtgaacatatttaaatgcctaacattatctctattactatgcagtatccaattactatacgcaggacgcatatatgacgaattcgaagatacctataaaataacttggattggtaactcaaaattgatttctggaacgaccgacgattgggcacaacgagccggagacatctatcgattgaaaatcgacgatccatcaaactactcattcttagtttatgaactgcccgaaaatgaaattgctcatgaaataattgtcgattactattctccgaccggactacgtcccactttggccgtaaaaaattcggccggagaagaaaccaaatatgtggaaggttgggacaacggttatccagaaataacggataaagggcatggactatatcaatgtactttaaaagacagcttgataccggaagatgcgactcaggtcgttatctatttagatgcccaatccgacatagaattattaagaaacatagtatattatggagatggctatcaagcgaagaattacaacgaaaaaacgaactattaccgggttcaaaagctattggaaaaagctgaaagcggtaatgacattaccatcggtgtcataggtggttcgatgactgccggagccaacgccgaaccgatggagaccaattgttacggagcccgattaaagacttggttcgaatcgacttttggaatcgacgtcaatttcatcaatatcggtatcggttctacgaattcctatttcgggtgtatccgtgccgaagagaaactattacgattcaaccccgatttgattataatcgaatatgcctgcaacgatcaactcgaagatatttatctggattcttacgaaagcctgatacggaaatgttggaaaaacccgggtgagccagccgttatatcgctaatgctatgcacgcaagctgggatttcaaaaatcgaacgtcaatatcccatcgctcaacattgtcaaattccgatcgtcagttacaacgatgccataaaagacgaaataatcaaaggagaaaaaacatggctggactattaccaaacctctacactcatcggcggtgatggcatacaccccaatacaaccgcacatcaaaaaatcgccgacctaatagcgaccgaactacttgaagggaaaaaagcatcgaacatcgatcgaatggcatcactaccagctccgctatatagcaacattttagaagatgcattttatttgagcgaaaccgatataaccccggtccaaacaggtgtctggacggcgggaggttctatttgggatttcggcacaggaaaaggttggagaagcgaaattgcaaacagtgaacttcaatttaaaattaacggagacgttgctgccgtcacatattggaaacgcccggcaaacgaaaatttcggaacggcccaaatttgggtagacgacaatccggccgtagtcattgacggctctaacggagaacacatcgaccaaatcgtattgaccgatttgggaatcggagaacatatactccacatcaaactgttggaaaacaaaaaattcgaaattgtatgtattgccgtttcgggggaaagaagctattggaatggacgatactatttggaaaacgttgccaacaatcttaggttaacgatcagcaataatgacattacgatgaatccgaacggtacaggttttaatgtttctcataccgacgacggatatatcgccttcaacgaaaacaattcatatctatcggtcaatgctgctaccggcgctttggaactttcatcgaatctcgacaccgcctcaaaattcctctacatagacaaaggtgaaaaagctgcaatacgggctttggctaacggaaaatatttgtctcaaaaagacaacattataacggcctctacctccgatatagccgacaatgaatattttctattcaaaaacgaaggcgatcccacgactattaacgaattaaggaacaacgaaatcgactgttccgttgtatccaatcaaatcataatcaaaaatgcaatcggagagcaagtcaatattttcgatctatccggtaaactactatatcgacaaaacatctcgaccaataatgagaatatctatttcaacaatggcaattatttaatacaaatcggcgacaagacatttaaatgcaatatataactacccattccgctatgatgacagccaaagaaaatgtaatacgaacccttcgacatgacaatccggaatggattccggtaaacctgtggcaactgcccgccgcaaaactaaaatacggacaagcgcttgacgacatcatcaatcgctgcgaaatcgatattctctccgctccgttcgacgaccccaccgaagacgcacgtcactaccaaatcggcagttataccgattgttggggatcgacttgggtaaatcaccaagcaggtattatcggagaagtaaaagaatatccttttgccgatttcaataaagtttggaactatgaaagtcccaaaaaattatttttatcaggcatctctggatttgaaaagacaaaagcattcatcgacactcataaagacaaatttatcttaggcggttggattagcttattcgaacgtatgcaataccttcgtggtacagaaaaccttttcatggatacgttgattgaatctccggaatatttcaaactaatggaaattgtcgaagatttttataacacctatttagacgaatggctcaaattagaagtcgacggaataattttcggagacgactggggctcacaacgctctttattaatctcgcctgaaacatggagaaaacaatataaacctttatacaaacggttttttgacaaagtccatactgccggtaaattcgtttttatgcatagcgacggctacattttggaactatacgacgacttgatcgagataggagtagatgccatcaatagtcaagtgtggtgcatgggattagacaaagtctccgaaaaatgcaacggacgtattacaaactggggcgaaatatgtcgtcagcacatactccccgaaggaagtgtcgaagatgtaatcgacgccgtacacaaaatgaaagaagctctatgggtaaatggtggcctcatcgggcaattcgaagccggacccgatatgccactggaaaatatcaaagccggtttaacccattggaacgactaaaaattctctcaaaacatggaacagtttcagccgaatgcaaacaacattctcgatgtcctttataacaaaaagccaaagtatctccctctatatgaacatcacatcgatattgaatttatagagaaatttacaggagaagaacttatcggttaccgagaaacagaaccagaatactttttcaaaaaagtaacggagttttggaaaaataatacctacgatgcctttgacttcgaagctccaatctgcgacgttttcccggagcacggtgcaattatgggaggaaaattaggccccattcaaacccgatcagattttgagcgctatcccttcgacgaaataccccatttgttttgggaagcgaacaaacccaaactcgacgctatcagaaaagtcttgccaacaggaatgaaagcatatggaggatgcgggtatggcattttcgaatccgcccaagatttggtaggttacgagaatctgtgtatcatgcaatacatagaccccgatttgttccgcgacctttttattcgtatcggtgacttatacgtcgaattatggtccaaaatgatacaagaatacagcgacatcttcatttttttccgtatgggcgacgacttgggacaccgcacatcaactatgctcgaaccgacaaccatcatcaaccacatacttcctcaaaccaagcgtataatagacttggtacatcatgcagaaaaaaaatttcttctgcacagttgcggtaacatattcgaaataatgcccgacatcataactttgggaatcgacgcaaagcatagcaacgaagaccagatcgctcctttcgacgaatggataaaacgatataacggtcaaataggactttttggaggcttcgatgtaaatctgctttcgttgggaacctatcaatccgtatatgacgaagtattgagaaaaggcacagaataccggcgcatttgcaagggttacggattaggttcgggtaattccatcgcttcttatgtctctgtcgatggattcagaggaatgatcgatgccgtcaaacaaattcgaagaaaagaaaaataacaaaaaggatttatctatatcgcgagccattatcccagttcctccgactcaaaattttaattcatcacaacaagataagtcacgcaaatatttgaagcacgcgttttctaaattataacacttttgataacatgaaacgaaaatttattttacttacccttgtaattgcaacattgattgtccctgcgaatttacaagcattcgaatcaactgttgaggaagaattacaaacaccgtgggaaggtttcgggtacaatcaatggggattcgcccgcgaaagcgacggtaacacctttaagccgtggtccgatgatttatggaaaaccacgacagaacggatccttgccatcaaaccttcgttagtccgcttaccggtaatccgcgattggttcaacaaagacgatgatgggaataatctgcccatcggaacttataattgggatagcaaatacatgcaggcctatttcaaaattatggacctttataaggaacacgacattaaagttatgagtggtttctggggtgtcggatataacggagaggattataaacaattttacacgaccgacgaatgtgcccaactgcaagccgacctcatcgagtatctttttagaacaaaaggttacgacaaaatcattaccagttatgcgccctcgaacgagcctttgggagtaggtatctcttacgaagattggagtaccatgataaaaaaactttacaccgaattggagaaacgtggcttacccacaaattttctgtcgggagccgattcatggagcgactggatatggaaacctgcacaatacaacgcagatcaactgtcagcctatgatttccataactacctgaacgatacgcccgacgatacttacaatcaattatataatcgcaccattgaaacgacttttgcaaactatctcgcaaatgtctataaatacgacaatttcaacaaacccgtccatgtgtcggaaatggctcccatcggagtcccttttatcgactggcctgttgccgatgctccggctcattgtcgaatcgacacctacgaatatgcattaggtttttgggactacggcatacaacttgcccgttcgggcatggcatcgggattggcttgggctatcgacgggctggaacagaataaaaatgccggcatgtggaacaatgccggaacttatggcggtatgactttacgtccctggtactacacatggcaactgatgtgccgttactttccccgtggagcaaaaattctcaaaatgaccgaactggaagggcgcaaagatattcgtatactcggagcccgcatcggctccgaagattactcgtttgtcgcagtcaatcgacgtatggatgctcaaagcaaaacacaatccattacctttaaggtcgattgtaccaaacctctttacatttatcggttcaaccgcaacagctgcggagatggcgctgcgttgtctcttccgtatgaaaaaataaccgatcaaaatctttctaccggaatcacggtggaagttcctatggaagaaggtatattcatcactaccttagaaccgttggagacaaatacgtccgaaacacagtctactctaaccatcgactttgaatcgcaagacgggtatatgcttctcggcgactataacaaagggattagaacctatgtaggttctaatccccgcaaacgagaccctaataccagcgacaatgccggatactccgaaattctaattaacgacgaatacaatccccgagattgtttcagtactatatttccgctcaataaaatcctaatcagtgaagattttccactgctcaatattcagttgtacaggagtagaccggcaaaaatcgccattgccttacatatacaaaatgaagacagactattgggctacgaattcgaaattcctcatagagaatgggaggagttacaactgaacctaacgcctctaatcggtaaaacactggattacatcatcatatatccttatagagattcagcgacgacttccactctcgacaccgaatctttgatttttgacaacatctttctatccaatacagaaaattcccctatcgatttacaagaaattacaacaaacaacgaccaacaataccgacaaattctggacatcgacttcgaatatttgaattcttttgtaaaagttattccggccaattcctccataatgtcttccattgcttcaaatcccaaaatacaagaaaacaatcccagcgataaagcctgccaaataaatatattaacaaacgatgccggtcaagacttgtccgcacaattaaatttatatccatttgtacaagttcccgaaagtaaccacaacctgttcttctcatattaccgcccgacaggacaatccgaaatcaagatagtcgtcaatttcctttcgggagaaaaagccgtcgggcacttttcctgtaacgagaaaagagaatggtttaggtacggcctgaacttgtcgaatcatgtcggtcaaatcattacaagcatcgacatctatcccaatttaaattattcagaccggctgaacgttctcgacacttctttcttcgacaattttatatttagcgccgaagaagtttcgggaatcgaatatgtaacaaacaacgacatctcggtaaccgccgaaaacggatatatttatattgaaggcgttaaaaacatgcctgtctatcttttctctgtcgacggtaaattactgcactttgcagaaaacgtaaacggaagttactccattccggcagagaatggagtacatctcattaaaataggcaatacttcttataaaataatcaacttctaataatccagcgaaaatggcaaaactttcagatttacataatgcaatcgtaaaagggaatctcgaactggcagttagtacaacccaagaagcgcttcaagaaaatatcgacccgcaaacattgatcagcgattatttgattaaaggaatggaagaaatcgggactcaattcgaagccggaaaagcctatgttcccaacctgttgatgagtgcccgggctatgaaaggagctttggaacttcttaaaccttacatggaaaatgacaaaaatacaatctctctcgggaaagttgtcattggaacggttaaaggcgatctgcatgacatcgggaaaaacctcgtaagctctatgttggaaggctgtgggttcgaagtaattaatctcggtgtcgatgtttccgatgaaaaattcgtcgaagccgccaaagaacacaaagcgaacattgtctgtatgtcggcacttctgactaccacaatggtttatatgaaagaagttatcaaagcttttgaaaaagccggaatcagaaacgatgtcaaaatcatgattggaggcgctccactcagtgagaaatttgccgaagaaatcggagccgacggatatagcgacaatgccaatgccgctgtaactctcgcccgaaaattattgaacaaataagagaaatggaacattcactgcggttcgaagaactaaacttgacaaaagaaaccgtatatatagaaatggggtatggagcagtatctcccgacaaaaatgttcgggatttagtcgacaacctgttcctcgttgcaaacaacatagtaagacttcgtttttactttcgaatgttcgacgggtatgtaaacaaggattgtatatgttgtaatcaaaaaatatttcacgttaaccagactatcgccacactgttgaaaaactccgaaagattcgtttttttcgctgcgactgccggtatggaatatcaagattttcacaataaactatcgaatgcagacgatgcattgctactattcatttgggatatcctcggtagttgcattgccgaagcgacaggagacattatggaaaagttcgtggaaacagaattgccgggaataccccatactaaccgttttagtccgggttattgcgggtggcatgtgaatgaacagaaattactcttctcactcttacccgataatgtgtgcggaatcactctcaatagcagtgccctgatgtatcctataaaatctatcagcggagtgataggctctggacttcatgtcgatacccgcaaatacggttgtcaattctgcgaactggacaactgttataagaaacgaattaaaaaatcatttaatcatgaaactcaatctcaatcggaataaacgatatgctatacccattatgacacacccgggaatcgagctcatcgagaaaactgtaaaagccgccgttaccgacggccagacacatgccgacgccattatcgccttgtcagaaaatactccttccgatgcggcgacagtcatcatggaccttaccgtcgaagccgaagctttcggggcaaaacttcatttctccgaaaacgatgttcccagtgttgccgaaaggttgcttcacgacaggaacgaagtggaaaatctccgcattcccgataccgataccgcccgtattcccgaatatctgaaagcaaacagacttgcggcagaacgaatcaatgaccgcccggtctttgcaggttgtatcggaccttattctttggcaggtcgactttacgatatgtcagaaatgatgatggctatttacgtcgaacccgatttagcaaaaatactactctcaaaatgttcagaatttattctcaaatacattcgagctctgaaagaaacaggagtcgatggtatcatcatggccgagcctgccgccgggttactcagcaacgacgatgccacaatattctcgactaattatataaaaccgatcgtcgaggccgtacaagatgaaaacttccttttcgtattgcacaactgcggaaacacagggcactgtacgcaatccatgatcgactcaggagcaagggctctccacttcggtaatcaatgcgacatcgtctccgcccttcaacaagtaccgtccgatcgcattgttatggggaatcttgatccagtcggtattttcaaatcgtcatctccgaaacaagtctacgacgaaacggagagactgctgcatgttactaccgatttcgacaactttattatctcaacgggttgcgatgttcctccgggtgtctccctcgaaaacataaatgcattttatcaagctgtcgagatttttcgtaaccgacattaaaagtaaacgtctgtactttttactttgtatccgatgaaagaccgaaccttttcattataacaaagcgattgtaataacagaaagagggcatactcacaatgagtatgccctctttatattccgtactaacatttcaccgtttttctattttcacttcacgaatacgagtattagagaaataaccgttcggcagcatttcaatctttaaataattgcaattatcgagttctgttttcggtgttatggtcgaatgaacaaaacgccaaacagacatttcgggttcggtaaacgacaattcgacctccctccactcgcaattatccggcgagacgtacactttgaaacggtcggttatggtttccactcccgacaccttgatttcaaaataattaaacccgtcgaacttataagttatataagcatgttcttcattggtcgacgggtgaatagtcccgcaatcttccaaaactttgaagaactggaaatcgggagcagcagtgttacattcgtcatagaatttagggaaaccgtttaatcccaaattattggaatgatcatacatacgttggacaccttccatcggatccatcatatatttatcatttttcacaatttccggtttgctacctccaatcgtagtcaacaaaacaaaacctttcgcggggaaatcgataactatccccttttgaagattgacatctttcaagacttctttcacaaccggaaagcctgctgtatcgaccggataatcgtcctcgaaatacacatatttattgattatcggatcgttcacgacagtaggaatctgtacggttacacgctgcgcaaaatcggctgtatttgtaatcgcaaatgtcaaatctcctgtcggagtcaatgcggccacaccattcaaattctgagtcctataagaattggaatacaaaattttcgaccctttcgggatattacgcgacatcaacgaccacgtataaaaccacagacgtatattcgcttcttccggtttatttttctgttctgcgatcgaattccaaaatccccaacgtttctgttcatcgaggtcgtccttataatgcatggcatcatccataccccatgccgcagcagccgaccagccggaacgcaaagtctgaatcaaggcatcggcaacgaacgttccataccaccactggtgaatcaacgtatgctggtcaagcacctcattatgtccgtcacgaatacccatttcgccccaaatattcactttgctgctgtcctgcatttgtgtaaagaaacgaaacattcgtgtctcatcttccacacgattcgtaaaagtccaatctttattgatataccaatgataatcgatgacaggaaccacactatccaattcggtcaatgtcttattgaaccaaacatcagtcccccaataacctccgtccggacccacgatctcaatattattcaatccccgtttatccagttccgagcgtagattaagaatggcttttttccatttttcccatgaataaccggttcgaggatcattggccaccaaatttacttcattccccaagttaaattgcttgatacaagtcatgcccttctctttaaccaaatattcaaccaattcagctacttgaacggcatatcgggaatcgtccaattctatcgtatacttaggcatatcgacggggacagcctgtttccaattcggattcatcggcttccaccactctccaagcaacacatcgatgtcgttatccttacaaaattgaagctgacaatacaagtcgttcatgaatcgacgagaattagcataccaacgggcatcgactttcgtcgaatccatgtcccaaagcaatatagggtcgttcccgtcataaccgaaacagtagaaatagggcattatgcaacaacgaatataccccagtttcataaattcgactcgtctaaacaaacgatcccactgcgcctccgtcatcgaatcccggtcattgggttcccattgcatcgcccctccataatagttttcctgcaacacaaaatcggtatccacaactatcggattctgaacctcctgttgttctgtcttgcaaccggacaatccgaacaagagtaaaatcaaatatatcaatcttttcatatacaattatctactttcttaattatcaaatatttactacacctaaaaaagacgatttaatatccgggattttgaaccaatgcacctcggcttaaatctatatcattttgaggaatggggaaaagttctctttcctttgtataataacgtcccttatcgacatcttctgtcgcatagccgttactatatacagccgtcataatttctccataacgttcctgttgcatcaaatccatacggcggattccctcacaagcgaactcaaagcgacgctcgttccaaatagccaatcgcacttccgccacattatcggaagttatgtccggtaacgatgtcggctttgtgtcgggcacatacttttgaatgactcgtttcgcatccaacggactggattcgcgagctcgttttctcacttgattcaaatactttctagcacccacgatatcacctttttccaaacaagcctcggcatacatcaacaaaacatcggcataacgaatgacataaactgtcatttctacatcttgtggatagaccggagacgccgcatttaaagtctcgctcatggggacaaaatgtttacggtcaaagaaacgactgggataattcgcatctcctgtcacaaaatcattcccgacgaattggtcgccttgacgaacaaatgtccaagtaattcgcggatcctccgggtcaaaagcatccaacaaatgttgagtcggtaaatgaaacccataaccgccatcgctactgggaataaaccaaactccgttccaccccgtcgattcatcccaattctttccattggtgacatattgtatctcaaaaatcgactctctcaaattggaatttgggttcaaccattgagtcgcaaaatctggatccaattcatattctcctttttgctcgccttcaaccaggacatagagcattttataaacattctcaaaatcacgattataccagtatgtcctacccaacatggcataagccgcgccgctcgtaacgcgcccggtgtcttcctcggaatactcgctccgtttcggcaaagccgtagccgcagtaaaatcggctataacctgttcccaaatctgggctaccggtgtccggggtttatatatatccgcaggctgttcggcatgcaaaaacaaaggaacatcaccccacaaataagccagattaaaataccacacgcctcgtaaccaacgagcctcattttcataacgcgtaagcaatgtcttatcgtcttccgttaaatcagtattctccaaacgaaatatttcgctcttgtccaacaatgtatttatttggtaaatagctctatacgccatgttccaaaactggctcactttactgttcgtcgtaaatatattgaatgtttccaactgataaatattcctcttatcggtaaggccactgccacccttctcgcaatcatcggatgcacaatcgttgataaacatcaactccaagctcatatcgttccaactatccttcatatagaaatagcaggccgtcaatgcttgattgatctcttcgagattattgtaaaattccgtgtcttctcgacctccgtacatagtcgtatccaaatcctcatctgtacatgaaggaagaaggaacaacgagcctaacaatatatatagtattctccaccttagtttcataactgtaatcgtttaaaattgaacattgacccctactgtaaatgtgcgaggattaggataccccaaattctctatacccatattcaaagcattgccatttgggacttccgggtccatatatttgaattttgtaaatgtaaacagattttctccgctcacatataatcgcaaagaactaaacaccttcgtagcttcgactattttcttcgggaatgtatagccaatctgtacagtttttattttacagaagctaccgttctgcacataccatgacgaatttctataattatcattatcatcttttctggtaattccgaatacatcggttttatcaccgggattccgccacgcatctgtgtaagtttcggctaataaattcgttatactcgtctgcctgagaagagcttttgtccctacccaaatatcattaccggcaacaccttgaaaataaagagcaaaatcgattcctttatatcccaattcgatatttcctccataaatcacatcggggttggggtttcctatataatcccggtcattgctatccagcgtattatcgccattaagattcctgaaacgagcatcgccgggttctgcaagaggttgaagcaaagtcttcccatcggctcctacatgggcgagaacctcttctttcgactggaaaatgccatcataaacatatccataaaagcgtccgaattcttctccgatttcgttcttcgagacagtaccccaaatcggatcgttcgttccggtttcaaccaatttatttttttggaaagtaaagtttgcgctcacagaataacggaagtcgccgaccttcccttgatacccgatcaaaaattccaaaccccggttttctacggaaccggcattcacccacggggttgtaggataaccggccattcccggtaacggattctgcattaacatatcccgtgtcgtcttaatgtaagcatctgccgacaacgtcaatgagtttttaaagaaacccaagtcgactcctatattaccttgctccactgtttcccacttaatatctttatttcccttagatgtagaggcataagccttcaacagattcaaaccgctgttaaacccatacacccatgtatcataagtagaaacgacatcggcataagcgaacgaaggaatgttttgattcccgatttgtccccaaccaccacgcagtttaaccgcactcaatacattctgattccaatctttataaaactcctcctgatctatacgccaacccaaagaaaaagacggaaatgtcccccaacggttgcccggtgcaaatttcgaggaaccgtcggctctgacactgacagtcgccaaatagcggtctgcatagttgtaatttatacgcccaagataagaaatcaaatagttttcataacggctacccgtagaagttccctctttcgtcccggctcccacgatttggaaagcatcggaattactcggcgtattcaaccgctctgccgtaaaagaacgaccggtataggcttcccacgtgaaacctgccaccgccgaaatagaatgtttcccaaattgattattataactcaacgtattttgaaatgtataattcagttccgtagaactcgtattggcgacactgttttccaacaaaaatttactctccacattcgtacacatattatatggagtatcattcggcctcaaatcaaaaaacgggttaaactcggtataggtatattccggtaactcaaaacccaacatagtcttaaagtccagaccctttaatcccaaattgatatttaagtaggccgtaccgtcgatattacgattcaaatgttcctttttctgtcggttcaattttgcaacaggattcgaataatagctgtattgagatcccatatatttattaaattcataattaggatcctgcttatctgcatttttggcataaatcggtgaaaacggatccggtaacaatatttcattaatcggagtgttcaaatcatgacttttgacataggctgcacctaaggtctgaccgatcgttatccatttattaaacttgtattcgttgttcacacgcaatgtaatacgctcataatccgatgtcattacaataccctcttgattcaaataacctatgctgaaatggctggtcaatttatccgtaccgccactgaccgataagttatagctgtgtttaaacgctgtttgagtggtttcattccaccaatcggtatcatagacatttatatccgtcggctcgccatattcgtcgacagggcccaagccttctccatcgagatgataaagtcgggtaatatttctaggcatccgcattccgtcattttcatacgcctcttccaaaaagccatacaactgatcgctattcatcatatgcactcgattaattgcatttgaccaaccgaatgacgcatcaaacgtgatactggttttaccggatttacctttcttcgtagtaattaaaataacgccattggctccacgagaaccataaatggcagtggccgaagcatctttcaatacctcaacattttcaatatcgataggattaatagtattcacactgctctcttccataggttgcccgtccacgacatacaacggggttaaatcggttgaaatagaaccataaccacgaatacgaatcgtagctcctgcccccggagttccagaattggacgtgacataaactcccggagctttaccttgtagagactgggtaatattcgtgtcgcctgtttttacgatatcttctccctttacagaagagagagaaccggttaaatcgctttttttctgtgtaccgtacccgataactacaacatcatctaagataacttgattttccgacatcgtaaccgacatcgttttaccattcacggtcaccactttggtgtcataaccgatataacgaaattccagactttgtccgtcctctgcctttacagaaaaacgtccatctgcatcggtcatcgttcctatatttgttcctttgacaaagacgctcactcccacgagtggttcttgtcctgaattaaaaacactaccggaaacaataccactattattttgacccgatatttccaaaggagatatcgacaatatcaaaataacagataaaaattgccataatttcatcattccttgattttaaatttatatggggataaaggcatcttgaattctttaatatcccacacccgaaaacaatataataactttaatatgccaaattcttcaagactgtatcaccgactttacaagctacaaaacagtatatctgccagcctctccaagaaaattcatcgacattatcctctaatttgcatggttttaaaacatcgactacaagtaatgtcgaatatacagatattatccaaacaaacagtatctatcacatagtaccatttattctcattccataaaaataaaatagcctataactccctccaagccaaaaactaccgccgatttttatattatcttaaaggaaaggtgtaccaaaaagaattttttggtacacctttcaaaattcatcaatagactacaattttagacgtagtatcgccgatctttaccaaataaataccccgttcgatatctatttgcaaaaacccattcaacgcatatttccctatttccattccagaaaccgaatatacactcatttcaccggcttcgccttccacatagagcgcacctttaccaccccagactttcgatgtcgaaacgacattgtcggctatgccagaagatgtagcgacatcggagatatagatattatcgaggtatgtagtttctgctaccgcaacattgtcggttccgaatttttcattcggagagaaatagaattgcttgaaagtagacccaatatattcttctaaatcgatcactacttcctgccaattttccgatccggtaaatggaatttcttgattcttatatgaacatgtaccaccccaagtttccattccgaatacagaattctcatttctcaaaatactgaaatgcaaataacgaccgtcggtctcggtaatctcggtcaattgctcttcttcgccagacaacaaaccgatggctacaccaaaccaatcggcgttgtcccacccccaattcgggtcggttgggtcttgtacaatcttcaacaccttgtcgctaccattgaccgcatcttttttaggattatctaccacttcgatcgtagaagatgcattttgggaacccgccatatcgatgctataattctcggtttcaaagtcgacagaaaactcggtcggcacaatcattaaataaggaggtttgacatattcatacgagtctccgccttcataaaaaatttctgtacgacgatagcacggaatccagttagccacttcttcattggcaaccatcgtcactttaatctcttttactccctcaggcaaagcaccttgataccaaacatcgatccaatagttatttcctaaaactgcatcataagatttttcaaccttcatgtcggggacctcttgataattcagctcatcggttgaatactcgattttaataaactggtcgaaatccatacgatcattgggaaccagcacattgactatgaatccggttaaatttttatttccccaaatgtctctattaaatataaatgcagtaggagtagaagccgatgacttttgtacataactaccatctccataataggcatccgctgcatcattgaacaaagcactaccaccttcgatataacaatcacgctccacatcggcctgtgtcatttcattcacataggtctgcgcattaacattcactgatgctaataccattcccacagcaattaaattgaaaatttttttcatgataatttatttttacgggttaataatttttcttagaaaaaccaccaatactctaataatgcaattataatcaaagcaatactgatgtatctaaaatttttataccagggaactgttttcaattccctcgtatcgtcttgccaaacggatttattccatgtataagtttcgacatcggtctccttatttctatcgcacttgctcacgataatattcacaaggacactcaaaatcaacaaaatgggaacccacaacaaaaagtgaaacggtacgacgcctccgaatccgaatttataagtcatgattaatgccgacatagccaatcccgacattaaaccggcaaatgcgccgttgcgagtagaacctttccaaaacaggccgactaaaaacgtcccgacaatcggaggagccagataagaagagaactcttgataataggcgactaacgatgcaaacttaccgatcaacggggcccataatacagctacgaccaaagcaataaaagaagtccactgacctacgcgcaccaaatgccgggggctggattccggcctccacgacttataaaagtccattgtaaacaaagtagatacagagcttaatgtcgcactcagagtcgatgtcagagcagaaaccatacaggcaatcatcacaccaatcaaaccgacaggcaacaacttcaaaatcaatcgaggatatacttcattcgtatcgattccatattgtgcccgcaatgtatttccatctataatttcattgggcaacgtatctcccacaccgaacaaatcgatcattctgcccaccattcccggagctatgaaaataaacaaagtaaacacgtacaaaaaagccacgaataaaaagcccaatcgaccctcattgacagttttggccgacataactcgctgtactatgacttgattatttccccaaaaataaaatcccaaaataggaatagacaaaaaaatggaaaaccagggaaccgtagtatccgaattcggacgaatcaaatttaaccaaactccatcatggaaatgttctacaaaattttcccagcctccgaccgaattaaaacaaaatatcgacagcaacaccgaccctgcaatcaatattatggattgtatcatatcggcattgatggcagaagacaatccccctataattgtataagtacccgccatcaaagccattcctataataatccacatcatatctatttcgggaaaaataattttcagaatcaaagcccctgtatacaaagcagctccggcatccaaaaacacattgccgataatagtgatgaacgaaaaatacttccgcgaacgattatcaaaacgccttcccaaatactcgggtatcgtatatatacccgatttaatataaaacggaaggaagaataacgacacaaaaattattacgaatatagctccgacattataattaaataccgcaataccacttataaaaccttcgccagagtgtcccataagtgtcgagctgctcacactagcggcaaacaaagaggacccaacaacaaaccaattttgagattttccagctaaaaaatactcactggcattttcattcttcctgtttttaagagcccaccaaatgattcccactacaaaaagaagtatgacaactatatcgatatttgatatattcagttccatggggtatcttatttttttctgctattcgatttcacgaaatcgatcaattctttaaaatcacacgtagccaagttcacccattgatcagaagcaccataatagacatacaaaatattatccttaactacggcccctgtcggaaaaactaccccccaacgatataaaccctgcgtctcttcatacgtttccggttcaagaataaaatcttttgttctatacaatactcttgtcggatcattcaaatcgagaagagcggcgccaacgcgataggtaaagttcgcatctactccatgataaagcaaaaaccacccgtcgttagttttaataggaggagtattccccccgattttaacctcccaatcctcttcacccttcatcaataatttactctcggtattccacatcatcaaatcgtctgaactctttatccagatagaaggataatctgttccataattaccgtttgcattcacataatctttcgggcgatgaagcatccaatatttcccgtttattttctccgggaacaaaatcacatcgcgatcgtccaacgaaggctctgtcaaacgccccactttcttaaaatggagcatatctcgcgatacggcgagcgccgtattactgatattctccctcaaacacttcggagcattcggatcatgttccggcgcttccacctgatcataatcattcttccaatattgactagcaaaatacgggcgaaaagcatatgttacgaaaaactcactccccattttcacgatgcgcggatcctcgtttgaaccagcatcaaacgaatctttacccggtgaaaaaaccggctctttcgaaacacgcttaaaatggataccgtccgtactttctgccttgcctatatatacaagatgttctatatcatttccggccgccctataaagcatgtgaaaaacgccattatcatatattacccccggattacacacaactaaactttcccaataattctcaggattaggcgacaatatcggattaccctcgtatttctttaatttcataatattttatatatttatttcatcgacaaaattaagcgaaattccacatcacacttaatacattttagtcaaatacctatattatattgaataatattatgcaattttttatcataatacatcaaaatactattatacaaaacaatatatttctataaatcaaataattataaaattaaattataaataataatcatatatattattgataacacccaaattattttatatatttgtactatatattaaattgctccgattatgaaaaatatacaacacgaaatcaccccgattaatgaagacgatctcttcattatactcaatcacccaaaagccgattttgattatcccatacatttccattccgatttcgaactaaacttagtcctatgggattttggacgccgcattgtaggagactccatcgaacctttcgaagaggtcgatttagtactgaccggccccaatgttccacacaaatgggaaggcaacaatgtcgagagcaaccatgtcatcactatacaatttcacgaacagctcctaacattccccattcttcaaaaacgcatgttctcctcgataaaagatatgttggaaaaatcgaaaagaggaatccaattcacagaaaacaaaaattccgatattgtcaaaagaataatcgccatgactcaaatgacgggattcaacgtttgtctcgaattcttcgccctactctatgacctatcgaccaatccgcgccaaagaattttagccagtggaactttcgacaacgatagcatactcagggactcaaaaagccgacgaatcgcgaaaatcaacgagtacataaacaacaactacatgaatcccatcaaattatgcgatatagcccaattagtctctatgagtgattccgctctaagccactttttcaagaaaaggacaaatcgaaatatagtagattacattaatgacatacgaatcagtaatgccacaaaaatgttattcgagacgacaaattccatcagcgaaatcgcattcctatgcgggttcaacaacatctcaaacttcaaccgtatctttaaaaaaaacaaaggaaaaacgccctcggaatacagggaatcgatacaaaagattatgattaaatattaataacatcggtctataacactcttaatcaaaaaagtctatacaaatacacaacttatgaattctaaaaaagataagtataaaaagagaatcagaatagtgagatattcacggcattaaattatatttccgaaaggccgacataaacattcattaaaatatttaatgtctatatacgaataatctccacttgaagaaagatataagatagatcaaaaggcaataaaaaagtctcacaaatattagacttgtgagactttctacttattttagtatttagcggagagagaggctctcgaacctatacattcaagaaatatcataaaattacaaattactgataatcacacacaatttggaatacatagtaaatctaaatctttctgaatatcttttgctattccaaatattgggtgtatatttgggtgtagaatttcaaacgcacccaattatgaatatcaaacgaaacatcatttttgcattggaaagccggaaaaagaacggtgtgccaattgtggagaatgtccccatccgtatgcgcgtcatatacgcaagccagcgcattgagtttacaacgggttaccgcatcgatgtagccaaatgggattccgacaagcagcgagtaaagaacgggtgtaccaacaaattaaagcaaagtgcatctgaaatcaatgccgatctgctgaaatactatgccgaaattcaaaatgtgttcaaggagtttgaggtacaggaaaccatgccaactacccaacaactaaaggatgcattcaacctgcggatgaagaatgccaacgaagaacagcaggaagaagcacagataagtttttgggaggtgttcgatgaatttgtaaaagaatgcggcaatcagaataactggactgaatccacatacgaaaagtttgcagccgttaaaaatcacctcaaggagttcaaggaagatgtgacctttgaatatttcgatgagttcggattgaacgagtatatcaatttcctgcgtgacaagaaagacatgagaaacagtaccatcggtaaacaaatgggattcctcaaatggttcctgcgatggagcttcaagaaagactatcaccagaatatagcatacgatacgttcaaaccgaaattgaaaaccacccccaagaaggtaatcttcctgacatgggaagagttgaacagactaaaagactatcagatacccaaagacaaacagtatctggaacgtgtccgggatgttttcctgttctgttgctttaccagtctgcgttattcagatgttcgtaacctaaagagaagtgatgtcaagtccgaccatatagaagtcaccaccgttaaaacggcagatagtctgagtattgaactgaacaagtacagtaaagccatacttgaaaaatacaaggacatccattttgaaaaccacatggcattgcctgttatcagcaatcagaaaatgaatgattatctgaaagaactgggagaactggcagaaattaacgaacctatacgtgaaacctactacaaaggaaatgaacgtatagatgaagttacaccgaaatacgcattgctcagcacacatgcaggaagaaggacattcatctgtaatgcgctggctctcggtattcctgcacaggttgtaatgaaatggacagggcacagtgattataaagccatgaagccctacattgacatagctgatgatattaaggctaatgcaatgaacaagtttaaccaactataaaagtatcaatcagtttcacagattatcattattaaagttatctttgtcagaacaagacttattaatatggaaagtaataataatcataatatagacaaaaggtattttgacgcttttgttcatgctgtcggttcggaaatagaacaggcgcaagtccgtcttattacagctgccaatgcccagatgttgttccattactggaagatgggtaactatatcctgtatcagcagaacttatatggttggggaggaaaaattatcaataaattggctcaggctatccggtttaactatcctgagaagaaaggatattcggagcgtaatcttacttatatgtgccagtttgcccgtttatatccgttaaatgtgcttcgtagctttattgaagcagattcaatactgtcagttccaaatattcaaaacattactaatgaactccttaaactcaatagcggacaatttacgcaggaacttactgcgcaaatacaatcagctgataatcaatctttagaaattacgcaggaggttcctgcgcaatttcagaatgtagcaaaaacagtagcaactatctataaaataaaaatagaggatatagaagatttattcttggcatcaccgattgcaagaataaattgggcaagccatatggtcatactcaataatccgctaccattaggtgtaaggtattggtatatgaaacaatctgtagaaatgggttggagcagtaatgtgctgaaaatgcagattgaaactaatctgtatgacagacaaatcaagagtaacaaggtaaacaacttcacagccacgcttccgacacctcaaagcgaccttgccaactatctgttaaaagacccgtatatctttgatttggcaggagcaaaagaaaaggctgacgaaagggatatagaagaacagctggtaaagcatgtaacccgttacttgctggaaatgggtaacggctttgcttttgttgccagacaaaaacatttccagattggggacagtgactttttcgctgacctgattctatataatatcaagctccatgcctatgttgtcgtagaattgaaagcaacgccattcaaaccggaatatgcagggcagttaaatttctatatcaatgttgtagatgataaactgaggggagaaaatgataacaagaccatcggtcttttgctgtgcaggggtaaggatgaggtcgtggcacaatatgccttggctggatatgaccagccgataggtatcagcgactatcaattgagcaaggcagtacccgaaaatctgaaatctgccctaccgagtatagaagaagtggaagaagaactgaccttattccttgacaaggacaagaacccataatataaagtatatggcaggaaagatacagacgatgattccccaatatggagaactcaacagaatatacagagactatatagataattacgctttttcttttgacaggcagaaattcatatcggatttctatcaggagtataatgacatgaaatcttttgaagccgctatccttgaactggtgcttgacaagcaaaaagagcaatacaccttgatactcaacagcctgaaaactgaaatagaaaagagcatacaggcttatgagatacgcccgttaagtgacagagccatagaacgtgcttgctatcagcacatggaaaggtattctcaggaaattgaagcccagctggatgttacaagaagtctgagcaagccgctgaatgaagccaacaacaggtatgattccattggttacagggagcatacagccgaagaggaaaaacaggcagagaaagaatatgaacgctgcaaggctgaatatgacagggaaaaagccaaactgaacaaactctatgaccagcaaaaggctacaagaacagaggcattccaatatatgaagaactgttgtgcggacatataccgtcaaagctgcctttttctggatatattgaagaaatacattcctgacggaaagcaagagaataaatcaagcgagccaatcagtcagcaggaaacgacagaagaacaacaggaatatttcagcatgaaattactttcgctcattcatgaggtgtgcgaaggagaacagttcgaagaaatttccgcaccagatttctatgccaatatgaatcttcacccctgcaactgtaagctgaaaataaaaccgagagagaaaatacgtgtatgctatctgatattcctgatgagcgagaaactctccaaacaggacagggacaaatggaaagacagaatactgaaactgctggatattgacgacagctactacaaatccaagtacaaggagcctgtttcagatttccccagtgacagcaaccaaaatttcgccaaggaaatggaacatatattcagataatccgtgatatatcctgatactttacgaaagttccacttttaccactcaaaataatttttgagtggtatttttgttttctgatattcaataagatacaatgatattcagtttgtaccgtccccatcctaaccactcataaccctacctaattttgcatcgttcgagaacagaaataacagccagtgcgcagggctgattgtttaacgactaaatagattggacgatgacaaatatccaagaattattatcaaaacccgtctggcaaatgacaggcgaagaattcatattcctgagtaagcacgcttcaggtcaggccgaagcattgccgcaacccgttacagacacggaaaagaagtatgtgtacggaatactcggtatagccaaactgttcgggtgcagtctgcccactgccaaccgcataaagaaaagcggtaagatagacaaggcgattacccagatagggcgcaagattatcgtagatgcggaattggctcttgagcttgccgggaagaaaacaggaggacggaaataatgggaggtatgcttatggactatatgaaagaaataaaggagatttcggcagaacaggcaataatcctttggcaagcctcacgcctgagcctgtcgaaaatctacgaaaaagcacctgagattctaaaagtgcaaggttcggtcattggtacactgggcaatttcagtgcatccatcggcaaagccaagagtaaaaagactttcaatgtatcggctatcgtagccgccgcattgaaaaacggtacggtactgcggtatgttgcggaactaccggaagaaaaaaggaagattctttatgtggacacagaacaaagccattatcactgtctgaaagtcatgaaacgtattttacggcttgctggtcttcctgatgacagggataatgaacatctggagtttctcgctttgaggaaatacacgcccgaacagcgtatcaggattgtcgaacaggctatctataatacaccggacatagggcttgtaatcatagacggcatccgtgatatggtatatgacatcaacagtcccggagaatcgacacgcattatttccaaactgatgcagtggacggatgacaggcagatacacatccatacgatactccaccagaacaaaggcgatgaaaacgcaagagggcatatcggtacggaactgaacaacaaggcggaaaccgtgcttctagtggaaaaggacaaaagcaacggggatataagcaatgtttcagccatgcacatccgtgcaatggatttcgagcctttcgctttccgtatcaacgacaatgcattgcctgaactcatagaggggtacagacccgaagcgaagaaacccggaagaccggaagaggaaaagttcgacccttacagacatattaccgaacagcagcaccgtatagcactggaagcggctttcgggctgaaagaggaatacggctataaggatttggaaaccgccttaatcaaggcatatatgtcggtaggtgtaaaactgaaccatcaaaaggcggtatcacttatcaccatgctccggaacaaacggatgatagtacaggagaacggcaggaaatacacgttcaagccggactttcactattagaccgtctaacctgtaatcacttcactttattcggcaggtctatatattaaggataaagcgaagcggttgcagagaatgtaaaaccgcttcactttattaccgtatcctatatatacgaaaataaagtgaagtgattatacagaccgtacttcataaaaaggtacgggcgaaaagaaaaataaaccaattcaaccattattaaagcaatcattttatggacatacagacagcaaaacaaatcaaaatagcggattttctgcacagtttgggatattcacccgtcaaacagcagggtatcaacctgtggtacaaatcaccgctaagagaggaaaccgaagcatcgttcaaggtaaacaccgagcgtaaccaatggtatgattttgcgcttggcaggggtggaaacatcattgcactggcacaggaactttactgttccgactatgtgccttatcttctacagaaaatcgaggaacagacaccacacatacatcccgtctctttctcttttggcaagcaatcattttccgaaccgagttttcagcaattggacattgtgctgctggcttctccttccctgcttgcctacctacaggaaagagggataaacacggcactggcgaaaagagaatgtaaggaagcccgtttcacccacaacggcaaacggtatttcgccattgcctttccgaacatatcgggcggatatgaaatccgcaaccgatatttcaagggatgtatcgcaccaaaagaaatatcccatatcagacagtcaggaaagccaaggagtgcatgttacgtttttgagggatttatggattacctttcctttcttaccttaaggctggaaagctgtccgcaatcacccgacttcgacagacaggattacatagttcttaattccgtagccaatgttcccaaggcactctatccgttgggaagctatgagcgcatccactgtttctttgacaatgaccgtgcaggaatggaagcaatacagcaaatccgaaaggagtatgatgctacccggtatatacgtgacgcctcgcaaatctacagtggatgtaaagatctgaacgaatatttacagaaatgaatagccgataggaaagagcaagcgcaatctgtcaaaaagaggaatgatacgctatccaagaaaccgaaaggcttccggttatagcccactataactacacgcttcgcttacgtagttgtgggctctcccgaggggattagggctttgccctaataacccactcagggtgtttctcccctgagaaccccgagcaaagagtgaccctctctttgcaatctccgcttatgggttacacccctaagaaccctgtgcggctatgagcggacaacagaatattttatcaacaatccgaatcaaaatttaagaatatggcaacaaagtcaagcatacatatcaagccctgcagagttacatcaagcggggctcataaccggagaactgccgagtatatgcgcaatatcggcaaatctcaaatctacatcgtgcccgaacttactgccgataacgagcagtggataaacccgaactttggcagtcctgatctgcaggtgcactatgaaaacatcaaacggatggtcaaagaaaagaccggacgagcgatgcaagaaaaggagcgtgaacgcaagggaaagaatgggaagattataaaagtagctggatgctcaccaatccgtgagggagtattgctcatccgaccggacaccacattggcagatgtacgaaagtttggtgaggagtgccaaagacgctggggtatcacaccgctacaaatcttcctgcacaaggacgagggacactggcttagtggacaacccgaatccggagatagggagagtttccaagtcggtgaaaagtggttcaagccgaattatcatgcccatatcattttcgactggatgaaccacgatacaggcaagagccgaaagctcaatgacgaggatatgacagaaatgcagagtttggcatccgacattctcctgatggagcgtggacagtcaaaagctgttacaggcaaggagcatttggaacggaatgatttcatcattgagaagcagaaagccgaactgcaacgtatagaggaaaccaagcgacacaaggaacaacaagtaagccttgccgaacaggaactcaaacaggtaaaagcagagatacgcacggacaaactaaagaaaacagccaccaatgctgctaccgccatagcaagcggtgtaggttctcttttcggaagcggtaagctgaaagaactggaacatcacatcgagcagctacatcaggaaattaccaaatgggacaaagctactgatgaattaaaaattcagatacaacaaatacaggaacagcatagcagacaaattcgtaatcttcaaagaatacataatcaagaacttgaagccaaagacaaggaaatatcacgattgagcaccttgcttgaaaaagcccacaaatggtttcccatgttcaaagagatgttgagaatggaaaaattatgcgctgttatcgggtttaccaaagacatgatagaaaacctcttgacaaagaaagaatccatacaatgtagtggcaaaatttattccgaagaacacaggtggaaatttgacatcaagaatgatatttttagggttgagaaacatccgatggatagtggtaagcttatgctgaccataaaccgacaacccatagtacaatggtttaaggaacaatgggaaaagttacagcagaatctacgtaactcggtgcagagagagcaaaaatccagaggatttagaatatagaatagcctattattaataaaatcaagtatctatgcatccaaacagattgtttttattacagaatcaaaatcctaagaatttataaaaaatgaagcctaaagaagttttggaaaaatggatagattgctttaacaaagcagatgcttatcatatagcagagctgtatgctactaatgcagtaaatcatcaagtcgcaaacgaaccaataataggtaaagaatcaatctacaaaatgtttgtgaatgaatttgccactgctaaaatggtttgtatggtggaaaatatttttgaagatggcgaatgggctatcatggaatggaaagactctcttggacttcgtggatgcggattttttcatgtaaaagataacaaaatcgtctttcaaagagggtattgggataaactttcattcttgaagcaacacaatcttccaattgaataagtactatcagaatacggactgggaaattgaaatacccagtccgagttatataatgaattttacttgttaaactatttaaagtcagttggataacaaaccatacctttcacattctcagtagctccaggtattaattcagccaccatgcaatattcatgagagacttcgaaaggaaattcaattcctaaatcgatagccttgcgatagccaaatcgaggataatactctttatgccccaatacgactgctgtgccgtaacccaaaagtgctgccctctgatgggcttactgaatcaacatccccccccaattcccttacgctggaattccggcaagactgccaatggagctacactcagggatgtgacagactgggtgtcactgtctatctttacttctgtaagtaagatataccagacaatttgtttttctgtcattttcttgttcttatctaattgttaggctcattgttgttatacattgtttaattatagataaatcgtgaatatccttctctcttaaatcgtagcccgaatggaatacttgttgcccttttgcagaaatgcaagggatgcttctgccttcaaagactgctgttccaaaatagtccggttgaaattcataccagcctccatccaagtcgggttgtttggaagtgccgtccgcattcaagacaaaaggatggatatcaatatagcctaattctttgctatacagttccacacgggtgggcaaccaatttgtttcaatttgatatcctctctcctgcaaaagatcaaggagttggtctgtataattggcatcaaaatcaatgtcaatatctctatgcaagcgggtttgctgtccgtacaagacatccactccccagcctccatccaaccaaaactgcatgtccaggctttccaacaagtccaaaacttgaaataactctgtaatcgtagtgtgttctttctttgtcatataataattctttaataaataatactatgcgtaattatccaactgcttgattgaagaaataaaatttgcacccactccaatcagaaagataacccatccgctgatcataaagacggatgtgataccccatgcttccacccaatatcctgaagctacgatacccagcattgatggaaaggtactcaaactaaagatgagagaaaaagtccgtccaagcatgtccgaagccaagttctgctgaataatagcgatgaaaagcgcatggtaaatggaataggctatgcctcctgtaaatgttaggcaaacaaaacctataaatgcgcttgatggtaaataactggcgctaatcagatacaatcccaatatcacataagccgtatgcatcactaatgtttgcttgcttttcaaagccttacaggcaagtactaaaccgcccaacaatgcccctgagccccaacccatttccacaactcccatttgcaaaatgtttccgttgaaatgcagaagcgtcataaaaggaaataacgtaaaaacaggcataaggacaaaagtcaccagcgtaaagcatacgaataaaggcaaaatgcccattgtacgccgcaaggtatgccaacattccgtcagttcttttttgaaatctggaagaactttcgttttttgaagagaaggaatctggacacaaagtaaggtcagacaagcagcaacagctccgatcacatctatgagcagaatatactgtatgggaagccaaacaacgaggcttgcccctacaacgggagctatcacctcactgaaggattgaatggaatggtacaaacctgataccctgacaagatggtgcttgggaaccagtagagggatgcttgcctgtaaagcaggtgcatgaaacgtactgcctattgaacgacaagcagtcaatagataaaaaaaagaaaggtctttataacccttggttatcacaataaaaagacatagggtacagaacgcgatgaacaagtccgaataaaacatcgttttctttcgattccatctgtcaacatagaccccggtaaacaagcctaatacaaattgtggtaaaaatccagctaaaatagccagagataaagctgtcggggatttaaattcgttgctaatccaaaaaataatggagaagccaacaatcgtacttgttaaaatagatatgagttggcctattcctatcacggccaaagttgatttccaatgattcattgtgctaatatttcatgcgtttatagataagtactttcgtacattaagcaaaacgaaattctatccacacaaaaaacttgtattataatccactcctgacgttggaatacaataacaaatactttcaggacgatgtaaagtcctgaaaaatcaaagtgaatggatagataaatattagtcttttctcatcggattcttttaatatcgctactcttttattatgtagtggttgtattatcttaaataaaacaaaaacaccagactttacattcttgggtgtaaaactgggtgtttgttttgcaatctgctgattttcagcgtttgttgcggagagagagggattcgaacccccggaacctctcagttcaacggttttcaagaccgccgcaatcgaccactctgccatctctccatagtcgacttctctatttaagcggtgcaaagatacgacttatattcgaaaaataaaaaagatttcatattttttctatcgacacctcctcttaacagtacacttctctcataaatactcgaaatacctcctatttcaataaatatgtcacccttctcggctcatctagtacgatagagaaggtagtacacagagacggagtgattagaaaataccaacaattactattacgttcctacgttttacatcgcagacgaaaaggagcacgagggcggtatctatcccaacgaagtcgaagctatcttcaaaaaggctttggtacaagaataaggttcaatcgaaatcaccatcaaaggtaatttgttatatcttcgatatgatttaattggataaagttcctgtattctacctttccctcatattgctcgtatgcccaagtgacatgatggggtacatgagcggcataacctccgagttccaatacaggaatgatatcggattttattgaatttcctatcatgagaaatttctcaggggaacattccaatttaccaagtagctttttatagtctgcctttttcttatcgctcattatttctatatgggtaaaatattcttgcaacccggaatttgcaatttttctttgttggtcaaacaggtctcccttagtcgctaacaccaatttatatttcccttgaaatgccgataaaacctcttttactccattcagcaatgtaaccggcctttgcaaaagctcttgacctaattcaatgattttgtttacaagaccgatatttccttctccttccgtcactttacaaattgtctcaatcatactaagcatcatgcttttcaatccatagccatacatatggagatttttcatttccactttaaataaatcttccgatatagatgatgacatctgatagggactgaggagattacaaaattccttttcaaattcttgaaaatacaattcattctcccaaagcgtgtcgtcggcatcgaaagctatgtattcgatcgtttttttcataggtcattttctttatcgtaataatcggataatttccccaccgtttcatctgcccctccgtcttttggataggagcgggggttgcgagtcctatatacaaaaagagagaaagccgaaggggttctccctctccggctctctcttctataagttggcggctgtggcctccccgttttgcgaaagtgctgcaaagatactgcctttctctattacattccaaatttttctcaatgttttttttgaattatttttctatgaaatgaaaactttttctttttcagattgttataactaaaatatttttacctctgcataaagcgatcaaagtaatttgaaacgcaaacgcaatatcccgtctttaaaatcataactaataatcttaaatacgcctatttcaaatgtattctcaacatgacgaccaatgcaaagacattcatcgtaatctcccactttaacaacccgaaccgtttccgaagcattatcgggcaatcgtctcaaatcaaaacgtcccagcgcttcttcttgtgtaatatattctgtcgtaatcggtaaaccactttgtataattcggttgacctgctgttctatttgatttatttcagattcttccggttcacgttggaatcggaaatcaagcttactcttttttctttctatatgagccgataccgcacgaccacaaccaaaaaggcgaatcatcgtttggttaagaatatgctccgtcgtgtgcatgggcggatattcttctttattatgctcatttaattggggaatatctttcataccatatatctttaaagtcaaatatttttacctgaccaagagattatttccgaatctaaaatactatatacattcgtatcgacatattcgccagagaacatcaattctccgtctcgttccgtcccttccaaccgaaatcccaatcgccgagggatagcattactcgaataattttttacggcacaccgaatttgaatgcgatgcatcaaacgtgcttccacagcccatcgacagagtgtccgaacacttcgggtcattattccttgtcgctgatattcgggcaatagccaataaccgatttcggtacgatgattgacaaaatcggaattcacaaacccgaccaatccacaaaactctcctcgacattctatcacaaaagtaaaatttctttcttcctccgggaaagacaatacttgcgataagaagtccatttcatcttgttccgaaagattagcaataaaaggcaaccacgttttcagataatccctatgatcggcaatggctcgataaatcataggggcatcgttcaacgtaacctcccttaatcggatacctgtctttacatcaatgtcgaattgtaacattatttcaataaaaaatcatatcggaaagaaatcagcactctggtaaattgtacattatcattcaaaggtatggacaactcaggacgaacccatagcttatgagctcgaaaaagaatgcccggaacaatacgatgttcgaccatacgatactccggaatattcgttatatccaaaaccaatgctgcctcttggatcacacgacaagcagcatgtaccgtatagcaagtgttatatcccataccagaatcgtacattggcataacaccagcaccgaactccactcgccctatcttcttatccaagccgatcttcaatccgctatcataaaaacgcccagcgtaattggtcccgaaaaaagcttcggcagaaaactttacgtcccaaacacccgtagagtaacggaaagttccgttcgctcggatatattgctcgttcagatggcgtataaatatggtattttccaatcccaccgaccaattctttgcctgaaacccgatcgacgcatatttattatttctcacacccacaaaaatcgacttggattgtaacgagtcattttgcgaccatacactcaaaaaagatattattcctataaacaacaataaaactctctttttcataattccttcgataacctcacattgagaatattataccccaaatcattcaaatgtaacccatctaacgaatagttcatattcattttatcttcataggcaaaatcgtcatacacatctaaaaatacaccataattcaacgtctcgaccatttgagataatgcaaaattcaactctttgatataatcgtttatatgcgggttatcgatctctcgatttctaggtaaaatagaaataacgaacacccgacgtggagccaatccttcgatcgttctcttatactcatcgacaaaatcggtaatgaactcttgcctcgtagcatcattgaaaagtttccctcccaaattgttcgttcctatcaacatcactacatttttgtcttgataattcagattccaagtagcaatctcctccaacttcgcgccactcacaccatcgtttcgtacaatccatgtgggaaaagcatcttttacgtcccacccggcgaccaacgagtcgcccacgaaacacaattcaccttctttttcttccgaacatgcacccaagctcaaaatcaaaagcaacattattttccccattctacacacccaattcagtctcatttttcttactctttatttttttgtaaaaatcactctttaaaatttggtttataaacatatcggtaaaaatccgagcgccatcgccatttaaatgcatgttatcataaaacagctccggtctatcaaaaaaatactccatttgattatcatctatcacccgaattccattctctcgacacaactctgtaataacccttttcgaatagggattcccctcgtgcctcaatttacgataatatggaggaaaaacgaccaccaattctacattgttcgatcgtagctgcgttataatcgctttcaaatattctaattttaccgagtaaataaaatcatcatcaggttcgtctccataattttcaaagataggcaaattattgggtttatgtttcgctacaaatccatgatttgccatttcttctctcggcaaaaaagattgtaagaaaatacggaaccacacggtattatatttatacaaattagatcgaagaaaagcagagcattttccatcattttgcaagaccaacgcagaatctataaccggatttctcccgtaataaggatttagtaactcaattctaccgatatgatcgtccgataaatcatcgggctgcaaagctaaaataactccccgtggtcgatggtgttcaagcagcccgtctatcatacatctgaaaaatattatgttctgagcattacaccccccattaaaaacagaaattcccaaactatccatcatgatatccggcataaaactattaatcgcgacagaagacccgataatcaccacatcttcatttgcctgatgaaacagatactctatctttgcataatctcccggaagcccataccttttagaataaaatgacatgacttgcccgaatataacatcgaaaacaagtacgattacaataatcgacacacatgttttcactaacttaaatatacttcggttcataatcggtcatctaaaattgaaaatagataaacgctccaccattgaatgaagccgtcaatataataaacgcaataaagagagatatagatatgattctcacccaatagttcttagaatttaaagcgtgaacttttatagacatctcatcttttatctctttcaacatcaaaatacctatacacataaatcctaacagcaacgaaggtattccttcccccgtaaataacggacctcggtcggtaaaaattttttcaatgatactgaatgccgaatgaagatcattcgccctgaaaaaaatccaagcaaacataaccaatacaaaagttaccaaacaattaaaaaccgtatgtaatcttttggatacatttaccttcgggagcaatctgtttttttcaattccgacaatctggtacagcccatgcaaactaccccacaaaacaaatgtaagattcgctccatgccaaatcccactcaccaagaaggttacaaacaaattccacaaatgtctgtaatgccccactctattccctcccaacggaatatataaatagtctttgaaccatgtcgacaacgaaatgtgccaacgccgccaaaactccttgatacttttcgcaaaatagggacgatgaaaattctccattaaagtaaagcccatcattttcgaagaacctatggcaatcaaagaatacccggcaaaatcacaataaatctggaaggtaaagaaaaaggtcgccagcaacaaactgactcccgaatgttccatataattattgtacacggcatcgacataagtagaaactcggtctgctacacacaatttcatgaaaaagccccatatcatcaacctaagtcctgcatcaaaattctcatacgaaaacttatgtttttctctaaactgaggaagcatatttttagctcgttcgataggaccggcgaccaactgcgggaaaaaagaaataaacagggcatatactacaaaatttttttctgcctttatcgttcctctgtacacatcaaccgcataaccgacagcttgaaatatataaaacgaaattcccaccggcaatagcacgttccatcgaggtatatcgattcctatatttaggagagagaaaaaatcggtaatcaacgaacccgcaaattcatagtacttatagaaaaacaaaatacccaaattgataaatatccccgagaataatgaaatcttacgccttcgacgagaccgagaacggtccatgcacaaggccgaaatataggtaatcgatgtacttgtcaacagcaacaacgcatatacgggctcccaacacatataaaaatagtaactggccagaagcaaaaatatcgtacgtcctttaatacccggcaacaggtaataaaccaagcatacaatcggaaaaaacaaaatgaattctaaggaattaaacagcacaacattgattctttaattcgacaagtagattattctgcacacaaatgtaatattattttaaaaaggaacagataatttattacaaaaatgcagctctcttaacagcctattaatcaaatcggagaaaaaacttttcttgcttcccaaaatcgggcatacaaaaaagactgccttgcgaatcaagaacagtctttttatttttcaatgtcaataacaataaacgtcattaaaacaacgacttactctacaaccaatttgaacgatttatcgccagcgctcccagacaccacagctaaataaatacccggtataaaattctgagtcgagacactcgcttctccgtcaacaactacatcgcatacattcaagccgtcgatagtatatatcttcaatcgaccctgagccgccacgttcaaaggctccccccgtttcactggattgggataaagtaaggtgacttctctttcggttcccgtcaaaccggtagaagtaccgtccatataaacctcaaactcggtaacagttgccgactctccgtctatatttccgcttggaatttcaattttcacataacgagccttcaccctatccacggtcaccgacttattcgttttattcaaatcgcccgatgaaacaagagtccaaacgctattctcatctgcactattatttattttattaaggtcgggggtctctgtggccacatagatattatacccttcgatttgattcgcatcatataccttgaatgcatttacatcatattcgtcttccaaatcgagaatgcaataatgcttatcggcggcagacctatcgaaatcccaatgatactcggtattttcattcaacccgtcaaaaatatgccgggcattggtataaaacgatttagcccccgaggacttcaaaaacgttttacctacactcaccaaattgcccctatccgttctttctttcaacttaccgtaaatatcgaacccatagatacgcacggcattttcaccggtaggaagttccatcgaaaatttaacaaaccgggcttccttaggctcggccaaacgatgatcctttacattggcgtttcccgcttccgcatcattgcgattcaccacttcttcccaatcaccgtcgtttcccgtcctactgacgtaaatacgataggaatgaacattgttatttccctctaccgttttcgaatcccgaaagacaaaacgatcgaccatatacacatcggccaactcaaagatcacccagggattggtactcttattgtcgcaccatttcaccccctttcccggctcctcaaaaaggcaataagccgcttcgttattgcttacctgtgcactgtaagagtgtatacgcacttgcggtgaatctatttcgggagaaacctcttcaactcctatcggcgacgatggaggcatttctccatcgatagcccaatcggacggtttatcgcccatgacaagctccaaagtcccgccattaacgatttcttcatgcttcaaccagcaccgaccgagctcttgaccgttcagtttggccgattgaatatagatattcttatcgcttgcattaggagccaatacttcaaacacttttcctccgtcgagattaattgtcgttttcgtaaataccggacttgaaataagatatatgtcctgtcccgcattaggataaaatcccattgaatggaatatataccaagccgacatcgaccccgagtcgtcatttccgggtaaccccgtagcagtcgtattatatcgctctttcaaaaccctacggacaatctccgccgccttgtcgggacgattcacatagttatacaggctcggtactaaaaatgccggctcattgcttatttggaataatcccatatagctgttttggtcgaacccgtcttggacatgcgtaaaatatgtatccagccgcttcaagaaagcctctttaccgccacatcttgcaatcagcccgttcacatcgtgaggcacgtagaacgacatctcccacgggaatgattcatatacgattccttcccaaccatcgcgacgaaaaacattgtaatctttctcgttcacccagtcgccactaccatttttcggccacaagaatcctttgaatccaagactattgatgttgtcgttccacaagtttttccagttattcgaccgttcgagatacttttcgtaaacatcttgtttacccaatttctttgctacggtagcgattgcataatcgcaataggcatattcaaatgtgcgagttcccgatcgctcggtcaccgtggaaatatatcctttggtattatactcctcgacaccgccacgaccttcatttctcgggttttccggttctacctcggcatttttaatcattgcggccaatcctttttcgtaatcaatacccggcaaatttttcacgatagcgtcagcaatcagtacatcgctgttcgagcccccctgtacacgaccgttacaattcccgctacggccgtccggcatatatccctcgtgctcataaatatctatcatagaccgtacgatatcggcctgacgagaaggtttcaaaagagcgaacaacgggtgtgtagctctgaatgtatcccagatggcataataatcgtcgaaataaggttcggacgattcccacagcgggttctcacccgtgcgatcggtaggttgtaaaaaggcatgatacaaagccgaatagaaaatagtcttgtcgttatcgttcccctcgacctccacagtgttcaacacctctttccattgtgcgattcctgcattgcgaatttcgtcaaaatcccaagacggaagttccgaaatgttcgctttggctttctctgtgctaataaacgatattcctacttttactctcactttttgcccctctgtcgtatgaaacccgaaataagccccggttttctctgttcccgttgcatctacctgctcgcccgattggacagacgtccctttccaaacagtatactcatcggcgggggtatccaacaaagcgtagaaatacaccgtataaggaccacctaaattccagcctcctttgacggtcgaataaccctcgatttctttattcgaaagaatttttacccccgaggctaccaattcctgtgattcgacatgtagtgtcagacaacttcctgcatcgatcaatatctttgaagactccgattgagggaaagtatattcatgaaatccggccttagcagatgccgtcagtctcactcccacattatacttactcaaagaaacttcatacaagcccaaaccgaatctctcgttagaacgtgccgacgaataatccgaaaggttcaaatctccggtcatcggttgaaataaaatatttccatacttgggaccaccgccggttccgctcacatgcaaatggctgaaaccttgtatattgccaccccttccccaacctgaattattggttcggtctccacaatcggctcctaatttcaccataccgaaaggcacacatactcccgggaacacatgtccctcgccgtcagctccgatttcgggtctcacatactcccaattctctcgggcaatcacatctcctccggtacaaaccatcttcattgtattcaaatcgacacggattgtatagactcccgtaacaggcacttgaaatgcattatcgaagccatcattggcggtagcccgctcatacaaatcgtattcctttcccgactcgacgagcaaatgtccggctatatctatacgacaagtaatggaaggttcccatttattcgacaccaaaaatttgaaccggccttcatctatactataatccgataaagttcctgtccacgtaaagataccaggctcctgcttttccatcgggatagcggcatccggatcccaacctgcctccgtagcattacctaccaaataaagattgtcataagcggcaaaagccggactaagaaacgataagaaaaatactaaaatgaaaaaagataagtttttcatgtttaaaaattttaggattaaatattcatgtcatttatatgacacgcaaaaagccaataacccttaaaaggtcaagaataaaatctataattatggaatattaatttataatattaagataagtacctcataaacaaggagaaaattcttccgattttaaagatttttacgacacgccaaacagagcctttgaaaaacaaattttattatattatatttgcgacatacatacttatatcacaatgcttctctttcaataaattcatgaaaataaccgaaaataatattatagaaagtttgaaatctggagaagaacaagcatttcgatacatttacgacaaatactacggttatttatgtgccatagcaaaaggttacctttccgataacgatgcggcagaaactgttgtaggagatgtaatttacaacatttgggaaatacggaaaaatctgaatattcatacttcgttacgatcatacctcatacgtagtgtgaaaaatagatctatcaattatttacagcaagagtacattgccaaagaaatttctatcaattcgctacaagattacaccgagatagaatctttttactttatagaagaagaacaccctttggaaaaaatgctcgaaacggaacttgaaaaaacgataaaatctgctatccatacacttccagaagagtgtcgaacggcttttatattgagccgttatcacgatatgaaatacgaagagatagcatcccaaatgaatatatccgttaatactgtaaaatatcatatcaagaatgccctatccaaactgagaacagaattaaaagactaccttgtcgtacttttactatttctgttatcgaatgaactttattgtaacactataaaaaaattattagatcttctaaatacttaaaattatttaaaaccactcatacagactaccccaaagaaaaaaaacatctgtctttcctttgaatatgaagagagccgacatacataccgagcacataaataatctgattctttcatttttgaatcggacaatatcttctacagatttaaaggtattgaaagaatggattgacgaaaatgaagacaacaaagcctatttttcggaaatacaaaaaatttggctgatttccagcatttacgaaaagaaaaacttcgataaattaaaagaccgggcttttcaacaattcaaagaccggatcgctcaaaaaaaccaagaacaagacatttatatctcacgtccaaattggaatcggattttttatatagcggcatgtatcattattgcattctttgcaggaataggagtaatgtactttactgggaatcaaagactctccgatcaaacgctatcctattcggtagaatctccacgaggatcgaaattaaaactgtctctcccggacggaacatcggtatggctcaatgccgattcaaaactattatatgacaacaacttcggtatcaacaaccgcgatgtcacgctatacggagagggatacttcgaggtcagcaaaaacaaaaatctcccttttcaggtcgtatcggacgatataaaagtagaggtcttagggacaaaattcaatgtcaaaaattatccagaagacccgaatatcaaagtcgcattgttagaaggttcggtaatgctatacgattctcttgaaagcacgaaattaaaaccgaatcagatagcacaatacgacaaacaaaacaaaaaaaccacattaaagaccatagcggcagaaaatacaagcgcgtggataaacggtcacctgtatttcgacgaggaaaacatggaaaccatcgctttggctttggaacgagcattcgatgtgaatattaccattaaagacgagaccctgaaaaaaatgatattctacggcgacttcattatcgaatcgaacaatatcgatgaaattatgaatatcatggctgccacaaacaaatttaactaccactataaaatccgtaaaaacgaaatagaaatatttcaataaacacattcgatatttattggtgtaatagacaaatccaatttgtctaactacccgtttcatacctaaaaccatgctcaaaacagttactatttgccgttcggtttatccgttaagattcattttactactcggtattctattctctttcaatgtttttgctaagcaaagccaagaagaatatatcatcgaaagagaaaactggaaagcctttattcgtctttcggacggtacagtagaccgatatgaatttcgggaacatggcgtatggaaaaccataccctttcgccacgaccgaatggccggaccggcttgggacggtatcatgctggctcacgataaaaaaaatccgggatcgtttatcggtgaaaaagaccacattttatacaatatctcgtacgtcccggcgcaagaccatctcatcgtcaaatgctccatgaccaacacggggagtacaccatacgctccgaaacaaagcaggctgattctcggtatcgatagtgaaatgcacgcctaccctcaatgggacactaaatttttccccactctgctacgttgtgaaaaagacttcgcatggggctatttcatgtctccgaaacaaaccatattcggttttacaacggccgaaccggttgcctcatacaccataaactacatttacgagggttggcttaaatggaaatggggacatcaaataagaactgccagtttagatatgctacattgcttacctctgccggaaaggcatccccagaacttaacggagctggctcccggagagacgaaatgctggcatatacacatgggacaaatacagtcccttcccgacgtaaaatcgaaactttcggaatgggctgctgttcccatgatcgagtgtaaccgctacaccataacatcgaaagaaagcatatccgtacgggggtattcgaccgactcgataagcatcgcaataaaaggccccggcataaaaaatcaaaaaagcctcacgaccgacaaaaaaggcaatctgtacacgacctgtttccgcccgactcaaaaaggagagtataaaatcacggtgacaacccgatcgggaaaaacagcagaagcccgtatattcgttcggcaaccgtggtcgtggtacatgaaaaatgcccgagacttcgtagccgagaaccaacccttattctccaacgcttgtgaaacattttacggatactacaccgcctttcttgcggcaaaacacttccccgacatggcaaaagacaacgccttgcaagaacggttcgacaacactctacctctaattatcgacacaaccacatggctgcctaacccgaaatcactgcctcaccgcatacaaaatttctctgccctaatgggaatgctggtcgacctatgggaatatacgggagaaaaacattacttggaaaaagccgcccacatcgcagattatctctgttccgataaaatacaagggcctgacggagcttatcgctcgcaaggaactcattacacggctgttatctatacagccaaatcgatgctcgaattggtggccgccgaagaaaagctcatcgcgaatcccgtttggaaagaacgccacgaacgacatttaaactcggcccgaaaagccgtagacgatttgtgcggacggctcgacgacatagagaccgaaggcgacatgactttcgaagacggcatgatcacttgcagcgccctgcaattgggcatgtatggattgcaaactaccgaaccgtcacagcagaagaaatacagcgaagccgcccgatatctgatggacaaacataaatgtcttgaacaattattaatccccgattgtcgcatgaggggagccacactgcgatactgggaagctctcgacgtttactttattcccaatcaagccatgaactctccgcatggctggacggcatggaaaatctacgcctcttactacttgtatctgctgaccggtgaagaattttatctaaccgatttcatggacacgctcggggcctgcgcccaaatcatgagagaagacggtcatttacgctggggattcattcccgacccctatatagaagccaagctatatgtagaaaatcccgagcaaaaacaccatggattagtcgtcgactctatcgtgggagaacaatacttagatatgataagtccgtggttgcgtcccgacgatgaaaatacaatctgtcaatttaaagaaagaggaggagccggagacaatacggttcaagaaattttcaaagtcatggaagagtgcgctctcacatcagcctatgtcctcatacgaaaagacggctctattctggcttacaattgtcaggttcacaagaaaaacggcactttgcatattatacccgatgaagccatcatctctaaggtacacttgaataccgcccgagaaacaaatatttccatacaggcgaccggcaaaaagattcgcgtgaaatcggttctcgggtgtaaatggatcgaactaaattaagtcttaccttatgaacaaaaaacttatttttttaatagtcagctttttgtacatggtgacggctacggcacaaccgttattaatcccatatccccgatcgatagagatacgggaaggatatttctccctcaccgcaaaaacaggcattatcaacctcagcgacaagaataacgcccggctgttaaaacattatatagaagaagatatcaatattaacctccacgaacaacgaggcgacaacaatatattcctaatcacgaaccgaaaactcaaagaatcgctgggagccgaaggataccgcatgaacatttcggctgattcgatcgtcatcgaaggagctgaaaatgccggcgttttttacggaatccaaacgttacggcagctagcggcacaaaacagactggctataccctgcatggaaatattcgacaaacccgaatacgaatggagagactttatgctcgacgaagcacgccatttcaaagggaaagtcgtcgtaaagcaacttctggaagagatggcctatttgaaaatgaataaattccactggcatctcaccgacgatcaagggtggcgtatcgaaatcgaaaaatatccgcgactcacccagataggagcataccgggacagcacccaaataggaggttggaacagtcccctctacgatgtcaacattcatggcggttactatacccgagaagacatacgggaaatcgtagactttgcggccgaacggcacattgaaatcgtccccgaaatcgaaatgccgggacacacctcggcggccatagccgcctatcccgagctcggttccttgaaaacaccccctaccgtggccacatatttcaaccccacgtggggagtattcaacgtggccgacgagcgtgtaatacaattcatacaagatgttttcgacgaaattttcgatttgtttccaagtcgctacatacacataggcggagacgaagtccaccccgaatcgtgggaagccaacagcgacatcagccgcttcatgaaagaaaagaatctcgacaattatagcgaagtgcaaatgctgttcaccaaccgggtcgcctcgctcatacacagcaaaggacgcacgatgatcgggtggaacgacatcatgggcaagaacattcacgagtgggccgactccgacaacgaaagtgcccatgccctcgccccttacgccatcgttcaattttggaaaggagacaccgccctcatagccgaagccctgaaacaaggccatcgagtcatcaactcatcgcacagggatacctacctcgattataatcataccaaaattcctttggaaaaagcctacgatttctctccttttccaaaaggcatggaccgaaaatacaaaccgttgctgttgggatcgggctgtcaaatgtggagcgaatggatacctcgcatcgaagacatgcaacgccaagtgtttccccgcatagcagcctatgccgaatctggttggaccatcgaaaataaaaaaaatttcacccggttctcgacctccctatcccaaatattgattcctcgatggaaacaaaagaacatcgcatggcataaagaatcgacaccgcaagccgaataaatcaatacaggtgcgtatccactcatatagttttagatagtttttcattcggtaacaaaaaaatcacgaaaaaatatttcgttatcgactacccgataaacatacagacttgtcctaattatataacaagaatattgttttatgactattaactaaaaaactttaatactaacctttaatcaaaccaatcaatgattaagcattacagaaccctgctactcgtgtttgcgctattctgtaatacggttgtcattcaagctcagaacgtttctctgaaattgaataacgtaaccgtaaaggaagccatcgaagcagtgaaaaagcaaacaggcaaatcattcttcttcaatgtgaatgatgtagatctaaaccatcgggtaaatatcgacttaaaagatgcgcccctcggaaaagcactctctcagattcttcaaggtcaagacatcgattatgaagtaaaagacaatcacatcgtcttatccaaaagaaacagtacaaaaaacaaccagacttttacagtcgtagggcaagttaccgatgagaaaggaatgccgctcatcggtgtaaacatcactgcgaaagggcatggaaacacggtgaccgacatcgacggaaactattctatcaaagccgcaccgggtaccgctcttgtgttttcctatatcggatatctgcaagaatcggtcaaagtaaacaaacaaaagacggtcaacgtccaaatgaccgaagacacgaaagcactgaacgaagtcgtagtcatcggttacggaactcagaaaaaagccaatctgaccggagctgtcgatgccatatcttcgaaagaaatcgaagaccgccccgtttccaacctcggtcgtgccctgcaaggagccgtgcccaacctcaatatcacctatggatcgggaaaacccaatgaagggacgagcatcaatatccgtggcttcggctcgatcaacgaagatgccaaacctttggttcttatcgatggtgtcgaaggcaacctcgacaatatcaatccacgggacgtcgaatccatctcggtgttgaaagatgcatcctcggcggccatatacggtgcaagagcctcgttcggtgtaatcttggtaaccacgaaaaaaggacaagacggcaccgccaaagtcagctataacggacgattcagcttctcgagctcgactgtcaagaccaatttccttaccacaggatacgatgctgcaaaactggtcgatgaatacttgatgtcctacaacgggactcgctacaccaaatacagcgaggaagacttcgccgaattggaagcccgccggtacgacaagaccgaaaaccccgaacgcccatggacagttatcaaaaacgtaggtggcgtagaccaatacatgcattacgccaactttgactggtacaactacctcattagcaattcaagacccacttgggacaacaatttgagcattaccggtggaacacaaaagttgaactatttcgttagcgccaactaccataccgaagacggtatatacaaacaaaacaccgaccgattcgagaccgccaatatccgtgcccgcatcagcggcgacgtaaaagactggttcaatctgacggttaccagccacttgtatcactcccgctacaaagcgcccgggttggacaacggtaacaacatcccgaactacacgtaccatgccatgccattctttatgccctataaccccgatggttcccatgtgttcagtaccccgattatcgcgcaacaacccaccgatggcgtacacatcatgactgccgatggcgagactttttctgaaaataaattcaaacggttgacaacctcggtgaacgctacattcaaactctataaagggctcacattgcacgccaattacagtttccgatacgacacacaagacaaagtcgtacgtacagcccccgcagaatattcgacggagcccggagtcattatcccggtaacaggagacctgttcaaaaacaaattgcgtcaacgtaataatagcgagtactaccacatggtcgatgcctatttaagctacgacaacacattcaaccaccaccacataagaggactcgtcggtttcaactacgagcaagattatcaaaagaatctttactccacaatgatggatatacaatccaacaacctgaacgacttcaacttgggtaaccacaccgaaggtgtctctttggaaggaggacaatacgaatgggcactcgaaagtttcttcggacgtgtaggatacgactggaaaggaagatacttggcagaagtaaacctccgctgggatgcatcttcgcgtttccgcagggacaagagagcagcggtattcccctcggtttcggccggttggcgtgtaagtgaagaacctttcttcgcacccatacgcaacacattctccaatttcaaaatccgcggatcgttcgggtcgctcggcaatcaggccatatccagcccctacccctatatacagacattggatttgttgcaacaaaactatctggtaaacggcgaattcctcacctacgcatccgtctccgctcccacagcaggtaacttcacttgggaaaccgttgttcatgggaacttgggtctagacctcggatttttcaacaaccggttgacattcgccggagacttgtatattcgcgacacgaaagacatgctcgtccccggtaagacactacccggagtatacggagccgcttcaccgaaagaaaatgccgccgacttgcgcaccaaaggttatgaactgactttgagctggaacgacaaattcaacctagccggcaaacctttcacttatggcgtatctttcgctttgggcgacaacatctccaaaatcacgaaatacgataaccccaccaaagatttcaacgtttctcaatactacgaaggcatgaccatcggcgaaatctggggatacaaaatcgacggcttgttcaaaaccgatgaagaggctgccgcataccaagccgaaatagaccactcgctcatcgccaaaaacatcttgcaaacggcaacgggcaaatataaaggattgaaagccggtgaccccaaattcgtagacctcgatggaaacggtcgcatcgacgacggtgaaaaaacggcaaacaatcgtggtgacatgcgtgtcatcggcaactcccgcccccgttacaattacagcggaagcatcaacctcggctggaacgggttcgatatttcggccttctttcaaggtgtaggtcgtcagcaccgttaccccgacggcaacgccatgctcttctggggtggatatgcccgtccctactcttcgttcgtgcccgagcacttcttggacgatgtttggagcgaggacaatcccgacgcttacttccctaaattaagaggttatgcagctcagggagaccgccatttggcaaaagtaaataaccgctatttgcaaaataccgcatactgccgtttgaaaaacctcactgtcggatatacccttccggtcgacctcacccggaaagcccggatcgaccgcgtgcgcgtctatttcagcggtgacaatctggtcacttggacggctctcaaaagcaaatacatcgaccccgaacaattctctaccgatggtagcgcccgggtctatccgtttgccaaaacattctctttcggtcttgatattacattctaataactttcattacttattctcatgaaaaagaacattaaatatatagttgcggctgttgcaggtttatggttgaccggctgtaccgacgaccttgaccgcttcccgctttcttctctttctcccgaaacctatttcaacacagaggaagagttggagactttcacgaaccatttttacagccagttcccgagcgcagcgtctggttacggagaatccgaagacatagttaacatctttactctacccgcaacgacgatcgggctcacccgcacagtccccaccaaaggaggcggctggaactgggactacctgcgtgaaatcaatctctatttgaaatactcccatcgctgtaacaacaaaatagctcgggagcactacgatggtatcgcacgttttttcagagcctatttctacttcgagaaagtaaaaagattcggcgatgtaccctggtataacaaaccgttggaatcgaacgaccccgacttgaaaaagcctcgcgactcccgccaactcgtcatggactcgatcatgtccgacatcgactatgcgatcaactactgtgacgacaactccgaactgtaccgcgtgaccaaatggacggctatggctctcaaatcgagaatatgcctgttcgaaggaacattccgtaaataccatggaatcgcaggacacgagacattcctcgaagaatgcgccaccatctccaaacgatttatcgatgagagcccttacagcatctacacgtcgggagacaaaccctatcgagacctttttgcctcgatgaacgccatacaacaagaagttatattggctcgtgactacgactacacaaaaggtgtgaagcacgaggccaattacaacaccatggcacaaacctacggacgtcccggcatgaacaagaaaatcgtaaacagctacctcatgaccaacggtgaccgcttcaccgaccaacccggctataagaccatgcaatactacgatgaaatgcagaaccgcgaccctcgcctcactcaaaccgtcgtaggcccgggctacatgcgtatcaatagcgacaaagtggaatcgcccaacttctcctcgtcgaccaccggataccaaatcatcaaatgggtaaccgatgcatcgggcgacggatacatgggatcttccaacgactacattctgttccgcgccgccgaagtctacttgaactacgccgaagcgaaagccgagttaggaaccttgacacaggaagacctcgaaatctccatcaagaaaatccgcgaccgcgtgggcatgcccaacatcgacatgtttgccgccaacgcaaaccccgacccctatttgtgcgcacccgagaccggttatagaaatgtcaccggcccgaacaaaggcgtgatcctcgaaatacgtcgcgaacgcaccatcgaactctgcctcgaaggacaccgttattacgacattatccgatggaaagaaggaaaaatgttcgagcagcctttcctcggcatgtacttccccggtttgacacaaggatcgggagacaaccgctacgacgtgttcgacatgaacgatggaatcgcaggtgacaaagaaaaagtggacatctgcatctacacaggcaaaaaaccttcggtgaagaacattcgtaaattctacaagctgggcgaagagttcgtcttgaccgatggagacaaaggcaacatcatctgccacgacatcgagaaagaaccccgccagtggaacgaagaaagagactatttcttcccgatacccaccaccgaaagatcgctcaccaacggagctttaacacagaaccccggttggaacgacgggctggacttctaagtgtataacatggaatacaggtgcagaagcataacttctgcacctgcattctctatccaaatataaaattcacaatctattaaaaaaaatagaccgacagactaccctctcgcaaaaagcatctgtctttataataaacacccaaatattaatttatcattaactaaaaaattctaagtatggaaaagtttacttttttaggtaagaaagtcgctatgtctgctttcttatgttgtttttctttggttggcttcgcccaagaagatactcaaacattcaatttcgacgcaacagaaacccaagagtatgcggcattcttcaaacagccctctgccattgaaggaaaatgcaatgccgaagtaatgggtatcgacatcaatcgcgaaggattctcttgggacgacatgaacacgtggaaaaactccgagggaaaaatttggcataaatacagcgatggatatgttgaaaccctttttggggtatgtgcaaatgccagcgctccgttcaatggaaaaacgagttctttatcttggacaaactccgaaggagataatagatggtatccggtactgcctgccgttaaaaatttgaaaggaaaattctcactaaccaattgtaaagctaccgttgtccacatctccaatacccaattggatactgtaagaatccaaatgacgaacgaagacaaggattgctatatgcacgttcgtcgtaatttaaactgcaaacaattggatatgagcggatccactggaaaatgtcgtcaattggccggttacaaaaacgcattctccgatgagaactccctcttgttcacagattgtcgtccggccgaattcctcgattggttgttcaatattgaagacaatcactacacattctctacattgccggtacaccctactaccggaaaagtattaggtagcggatacaaattgcaatgggaagctgccggcggatatcccatcggacagatgaatgccgacggtgaatacgaaatcgccgtaggagaagatatcgacctttccagcgaatatgacgtagatggtaatatcacgacctacacatggaaaaacatcgatggagaagaaattacgcctcccgatgcttccgacggttggttctgcttcgacgaatcgaacctgaatcaagaataccgctgtgaaatgacaaacgaaaaatacccggctttggtattaaaaacagtattcgttaaagtagtcagtgaatacacctctggtataaacaaggtagaaaacaacggcattgcagtaggaccgaatccggcagccgattacatcacggtgaaaggcgaagaagtacagagcgtagacatcttctcgcttacgggagcttgtgtaaaaagcgtaaaagacaatgttcaaactatcgaaatagcagacctcgcacccggtatctacaccatcaaagtagtaaccgccaacggtgaaaaggtagccaagtttattaaaaagtaagtagaaaacaattttttcttccaataacaataaccggcaagatattttccatatcttgccggttttctttttcccataaagagaccgaaccgaacacaacacggctcagccgataattagcggggagtgttcgtgtttgtcctgtatttttactcgttttgtgaattttttaatatagttcgttgcgttagcgatattaggggctcagttgataattagtggggatcctcctttttatacctctaccccctcaatcaaagattatatgatattttcaaccccctcgccctgcgggcactccccctatctcatctgcgatgagcagagggagaggattgaaagtatcactttgaaccgttttatcccttcggagctttgtggggggtattctcctcctcccctgccgtgtcccgtagcattacagagtgcttcagttttcactatcgggaagatattttagaactcctcccctgtgttttgtaacacaaaatataggggaggtggccgcaaggacggagggggtagataataccggtaagcggtaatgactggggtaagccccctctccccctgccgtatcccgcagcatggcggggtgttctgtataaaatcggagcaaaggcgaaagaggaatacatctcaacctctccccctgtgttcctgcaaggaatataaggggagtgcccgaagggcgagggggttagaatacaagcaaaagcacaaaccccgatctttttaacccctctcattcattaacattcaagtctatccccatgaattttctactgaaccacaacaccaacaaaaacacaatactttcacccagccatagaacgccaatagcgattgttctccgatacgaccggcgacctcctctcaaaaaaaataatttgcagactacccttttccactatatatttgtcttgtatataaatagccgtaagattttcgacaacacgtcggctttcaaaacaaaaacatttatcatgaaaaaaattactctgttactcgcgttttttatctgtctgaacatcagtttgaacgctcagacatatcccaaaaaagaaaatgtcattcgtctgctcacctacaacactcattattgcaaaggaggaagcgaccccggctctatcgacgattacaacactcagcgccttgcctcggttatcgaagccctcgaccccgatgtggttgccctgcaagaactggacagcgccatgagcgaccgtagaaggagagatctgttaaaacaaatctctgaatttaccggactcgattatcagcacatcttcggaggtttagcccccatcaatggcggtaaagtaggtccgggactactctttaaaaaagatttggaagtagtaaagaaaaagattattccgttagcaggcgatgaagcccgtagcgcagtacgggtggatttcgagaaattcacattcatgggaacccatctcgacctaaacgatgcaaaaagaacccaaagcgcaagcacattggtcaatgaaaccgactttatccgcaaaccctgtttcctcgccggcgatttgaacgattctcaccgatggagcaacggaggaatcgcattccctgtactggccgataaattttctatcgtcagcgatacagaaggtaacaccattccgggccggaccgacaacggggctctcatcgattatatcttgttcaaagattataaagactcgggaattaaaatcgttgagacacacattgtccgcacgttgaaagtaaatgggtctgtcattgacttaggatcgatatccgaccactaccccgtttatgtagacatcgagattcccgggctaagcggaatcgaaaatgcctcccgaagcaattcgattcgaatatatcccacccaagtacaaaacacattaaacattcaaagcgaatcccccgtcagaaaaataaacatctactcgatgaccggtcaaaaacaattagaggcaaacaaccccggcacggcatcggtcgacatctcctctttatcgaacggaatatacatcgtggaaattttcgcagataacggcacgacattcaaaggaaagattatcaagagataagtcattcttattaaacttatttatacaattatcaaagtccatataaatgaacttcgagttctttttatccctataaaaacagccgacaaacacataaaacacatcatgaagaaagcaatattactctctatcgttttggccgggacattgttctcggtaaaaccgcagtcctatcccaaagccccgggagcaatcagactactcacttacaacacccattattgtaaaggaggttatgatccgggagaaatcaacgaaagcaacgtgaaaaaacttgcacaagtcatcaaagctttggatgccgacgtcatcgccttgcaagaattggacagtgcctctcaaagccggggaaaccgttatctgctgcacgaaatagccaaacatacaggaatcgaatataccgatgtgtatgccaatgcggctcgcttcgacaagaagggaagcatcggttgcggcgcattggttagaaaaaatctgccgattgtcagccggtacatcgcttatctcccgggagacgagccaagagcggccattcaactggaactcgaaaaatttgtattcatcgccacacattccgacctcaataacgaaaaacgcagacaaggaactaaaatcatttgcaacgactcccgcgaaatgaaaaaacccgtattcgtggccggagacctcaacgattctttccgctggtcgcgaaacagcgcatctttccctctataccaaaaagattttatcattgcaagcgacacggtcggcaacacgatccccggaagaaccaacaacggcgcattgatcgacttcattttattgagcaaaaaagggaagaataagataaaaatagtcgacagcaaaatcgtgcgagaaataaatatcgagggaaaaacgatagatttgggtgaaatttcggaccactatcctgtattcacagatattatatgtaaataaatttaattgaaactttcataaagccatgttaagacactgtttcttattcataggactcatagccttatggatcacttcttgctcccggactccggaatatacagactctgccgcccggctcgccgaacgcattgtgccatcgcactccgatgatttcatctttacgctcgttcctgccgaaaaagatttcttcgaactaaggcagaatggcgataaaatagagatacaagggaataacggaatctctatggcacgcggactaaaccactatctgcgccactattgccatgcctctgtttcttggtgtggcgataatctggcttccatacccgatacactgcccgcagtcggtgaaccggttcatatcgaagcctctcaacccctgcggtattatctgaattattgcacatatagctactctatggctttttgggggtgggaagaatgggaaaaagaaatagaccgcatggccctacaaggtgtcaatctccctctcatggctgtcaacagccagtacgccgtttggcaaaatacgctcaaaagactgggatataacgaaaaagaaatatcggaattccttcccggagccggctatgaagcgtggtggctcatgggtaatctcgaaggcttcggtggccccgtttcccaaaaattcatagaccggcaaaccgacctccaacaaaaaatgctgcgtcgcatgagagagttgggtatggctcccgtctttcagggattctatggcatggttcccaacagtttaaaagaaaaattccccgaagccaacatcaaggaacaaggtgaatggcaaacctatcagcgtcctgcgttcctagacccgaacgatccccttttcgataaaatcgccgacatatactacgacgaacaggaaaaactgttcggtaaagccgtctatttcgccggagacccattccacgaaggaggtcagtcggaaggtatcaatgtaaaagccgcggctaaaaaaatactgcaagccatgagacgcaaaaccccagaagctgtatggatcatacaaggctggcaacgtaatcccatgcgcgacctattggaagggttggaacatggcgaggccatcattctcgacctcatggcatgcgagcgtccccaatggggcggcataaaaaactcgttgttttacaaagccgaaggacacatgcaccacgactggatttggtgcgcactgcccaatttcggcgggaaaacagggctgcatggcaaaatgagcagttatgcctcaggagtagtctttgccaaaaaccacccgttgggaaaaaacctatgtggaataggaacagcacccgagggaatcggtacgattcccgtcgtatatgacatggtatacgacatggcttggagagaagatagcatcgatataaaagactgggtgaaccaatatacgcaatatcggtacggtaaagccgatccaaactgcaatcgagcttgggaaattctgtcgaaaaccatttacgaatgtcacaatgaaataggagggcccgtcgaatcttatatatgtgcacgcccctccgatacaatcaaacacgcctcgtcatggggtactgccgagattttctatgatcccgcagaaatcgttacagcatgggaatgcatgtataatgtccgacacgaattcgcacaatccgcaacctatcaatatgatttggtagatctcacacgacaagttttaggtgattacgcaaaatatcttcacaaacaggcggtaaacgccttttatcgaaacgatttaaaaggatttcaagcctattcctccaaattcctcgctctcattcgagacgaagacaaactattgtccacccgcaaagagttcaacgtgggaacatggataaaccaagcacgcaacgccgcttgtacgcctcaggaacaggagcgtttcgttgcaaacgcaaaaagacaaattaccacttggacaaaccacgactcaaaactccacgattacgcccttaaagaatggagcgggttgatgagagacatgtatctgcctcgttgggaagcatgggtcgactacaaactggctctattgagaggagaaaccgcacaagaacccgattatttccaaatcgaaaaaaattgggtcgactccgatacacgctacgatagtacctctaccggaaatgcgatttctgctgttgaagaaatctataaaaaatacttcatcgaattacaacaaacctataaaaacatttaaatatcccggttctcctatgtaaaaaagcctatgtcggttgtctttttacagaaacagaatccttaaaaacataccacattatgcgacacaaaatttttatagcctttttatcccttctcaccgccacatcgaccctcgatatggcaaaagcccaatccctaccatacaaaaacaaaaatctccccatcgaggaacgcgtagaagacttgctgaaccgcatgactgtcgatgaaaaaatcgcacaaatacggcacatacactcttcgaaaatttttaacgggcaagagctcgatatgaaaaaactgaccgattgggcaggtaatacttcatggggatttgtcgaaggctttcccctcaccggcgacaattgcgctaaaagcatgtatctcattcaaaaatacatggtagaaaaaacccggttgggaatacccatcttcacagttgcagaatctctgcacggtgctgtgcacgacggagccaccatatatccccaaaacatcgctttggggagcacctttaatcccgaactggcacgaaagaaaacgcaaatgatttccgacgatctccacagcatgggatttcgacaagttctatccccctgtatagacgtagtgcgcgatttacgttggggacgggtcgaagagtcctatggggaagacccatatctatgcggccttttcggcatcgaggaggtttcggggtatctcgaaaacggcatatcgcccatgttgaagcattacggcccgcacggcaacccgttgagcggattaaatttagcctcggtagaatgcggattacgagatttgcacgaaatctatctcaaaccgttcgaaatggttgttaaaaacaccggaatattggcagtcatgtcgacctataactcttggaaccatatacccaactcagcatcacattatctgcttaccgacatacttcgtgacgaatggggcttcaaaggatatgtatattccgactggggtgctatcgaaatgctcaaaacattgcatttcacagcccgcaactcctctgaggccgccattcaagccatttctgccgggctcgatgccgaggcatcgagcaaatgctatcccttcctgaaaggattgatcgaaaaaggccagttcgatgaaaaaattctcgacacggctgtccgccgggttttattcgcaaaattcgctatgggactctttgaagacccttacggcaaaaccttcaaaaaccgtaaacgacactccccggaaagcgtcaaactcgccaaaacgattgccgacgaatcgaccgttctgctgaaaaacgaaaaccagctactgccgctcgatgccaaaagcctgaaatcgatcgccattatcgggcccaatgccgaccaagtccaattcggagattacacttggagccgcaacaacaaagacggtgtcaccccgctacaaggtatcaagaaccgggtaaacaaaaacaccgccatacactacgccaaaggttgcagtctcacatcattggacacatcgggaatagccgaagcggtcgaagccgccaaaaacagcgaagtagccgtaattttcggcggtagcgccagcgccgctttggctcgtgactacaaaagctccacttgcggagaagggttcgacctgaacgatttgaacctcaccggagcgcaatcgcaactaatacgcgaagtatatcgaaccggcactcccgtcatacttgtattggtaacaggaaaaccttttgtcatagaatgggaaaagaacaatttgcccgctatactcgtccaatggtatgccggtgaacaagccggaaactccattgccgatatcctattcggagaagtcgttccttcgggaagactcactttctctttccctcgcagcaccggacatttgcctgtctactacaactatctgccgtccgaccgtggattctacaaaaaccccggaagctacgactcacccggacgggactatgttttctcggctccttcggctctatatagtttcggatacggactttcctatacctcgttcgtttataagaatctctccaccgacaaagacaaatacgaattgaacgacacgatacacgccacagtagaagtaaaaaatacagggaaatacaccggtaaagaagtagttcaattatatgtccgagacaaagccagtacctatgtgacaccggtaaaacaactgcgcgacttcaaaaaaatagaattagcgcccggtgaaacccgcaccgtacaacttcaagtacccatctccgatctctatttggtcgacgagaaaaaccaacgcttcgtcgaagccggcgagttcattttggaagtaggacaagcatcgaataatatcattttgtcgaaaactatcgtggcgggagaaccatcgacgatcgggaatgacgaaatcgtaaaacctaaaaacaaaaaaagttcccgccaaatggaagtgaaaggagaagtgcgtgacgtgcaggctaccctcgttcccgatatgcagattattgaaaaaagcaccggaaaaaccattgctgttaccgacgcaaaaggtcagttcaaattcactaccggcaatcacgaatatctcatcttcaaaaaatcgggataccaaactgtcgaaatagaagtaaacaacatgaatgtaatcaacattactgtaaactacggagaaaactaacgaccctattattcatctcataaaaattatttataatgaaaagagcactttctatttcttgcctatggatttgtcttctcgtcctatcgagttctgtaatcatgggtcaagacaaccatttggacatcactcccactccccaaagtttggttcagaaaaacggacattttactttaaattccaaaacctcttttgccattgggaaaaaccaaagagctgatttaaaaaaagtagcggcctatttccagtcaaaaatcctatactccacaggatacaatctaaatataaaaaacagcggaagctcaaacgctatcagtctgcaaatagacaagtcgctaaaaatagggaacgaaggctaccaactgacagtaacccccaaaaaggtaattgtcaaagccaaaactccgcaaggaatcttttatggcatgcaatcggttatgcagttgcttcctccccaaatcgagagcgaaacgattatcgataacgtagcatgggaaatcccttgtgtggaaatcaaagatgaacccgcctatggataccgaggtatgatgctcgacgtatgtcgccacttccacgacgtggaatttgtaaaaaaacaactcgacatcatggccatgttcaaaatgaattatttccattggcacttgaccgacgaccatctgtggaccatagaaataaaaaaatatccccgtctcgccgaggttggctctgtacgccggaatgccgatggaagcatacatcggggcttctacacacaggaacaaatcaaagaagtcgttgcctacgcagcagagcggtacattaccgttatccccgaagtagaacttcccggacatgcacttgccgctttgaccgcataccccgaatattcatgtacaggaggcccgtttgaactacgcaacaaatggggcgtggaagacaacgtatattgcgccgggaatgacaaaacttttgaattcttacaagacattctcgaagaagtcattcctctgtttcccggcaaattcttccatatcggcggtgacgaatgtcccaaagtaagatggaacgaatgccccaaatgccaaaaaagaatcaaaaacgaaaacttgaaagatgcccacgaactgcaaagctatttcattcaccgtatcgaaaagataatccttgctcatggaaaatcgatgatcggctgggacgaaattctcgaaggaggactggctccatcggcgacagtgatgtcttggagaggagaagaaggaggaattgccgccgcttctatgggacacgatgttatcatgacaccctccaaatggatgtatatagatcatggacaaggagctgtcgaaaccgaacccattgccattagattcggactccctctcgaaaagacttatagctacgaccccaaatctccaaaaattccagaaaatttgcgtcaccacgttttaggagcacaatgcaacatgtggaccgaatatgccgtaacccccgagtataccgaatacctgttatatccccgcatgctggctttggcagaattggattggacacccaaagagaaaaaagattacaactctttcactcgtcggctcgacaatcaattgatccgactcgatatgcaccacatcaactaccacatacccatgcccgaaggccctatggccgaccgtattgcatataccgaaaataccacgctgacgttccacaacagccgtaactattctatggtatatacgaccgatggaagtgatcctcaaacaaattcgacaaaatacgaaaagccgttatatctcaataaagatgtaacagtcaaaatagccactatgctcccctcagggaaattaagtccggtacgctctatcgaagtagttcacgaaaagctcatgccggctaccgaaaaaagcacccaacccggtatcgagttgagacgtaccgagggaaacctctattttgtaaaagacctcgatggagcgcattggagtgcaccgaagattgtcaaagattttgaattcaaaccggatatcgaagacaaaggagcatactgctacaccggctacttcgaagttcccgccgatggcatatactatttttcctccgaaatggacgaactgagaatagacggaaaggtcatcatcagtaacgacggtaaactcatacgccattctcgcacacgtaattccatcgctttgcaaaaaggcaaacatgcattccagctactgatgattaacaacaacatcggcggctatctgcgcacatggaacaacaaaggttttatcttggctcccgaagggaacgaattagaactacccaaacccgaaaaactaacccattaatcaaagatgcaaattgaaacaacggggaagtcctaagagtaggacttccccgttgtcatattatccatacgccaacaagtatatttgtttctgccctcggtttacactatctttgcccaaaagaaagcagcaaatggactcagaaaaaataaaccggctcatcgcagaaaacaatttggaaaaagctcttgcatacatcgacgaatggctctcgaaccactcgaaagacgacaaggcatactacttgaaaggactcgtcttttggaaacaaggaaactggaaactcacaattgagaactatctgaaagccatagaaatcaatccagacagcccggccaaacaagcctatgaaatggtaatgaacattatcaatttttccaatcccgatctatacaatccgtaatcacggattaaaaaatcaaaacaaacaaggccaaatataccagcatttgcaaaccttgtaaaatccacgaaatctctcgtcgggtactatacacccgataactaatccacgtagataaaaccacatacaaaggcaataacatgaccaaagcccaaggtaaagcatcgccagcggctttttcgacaaatacaaacgttgctcggttcatcaaccacggccacgcaaaaaccggcaaagccgttataagaattaaaatcttgaaccaaccgggaacttcccgtgacgacttttctttctccatactataaacactcattcaaacaaatagaatcggcagactgtaatcacagaaaaaccgcaatcatatctgtgcgatctgtgtttccgcctccgggcgcaaagaggatcgccccgtacaatcaatccattctacactttatgcaaatatacagaaaacaagattgaaaagtgaaaaaggttgcaatataaaaatttgagtgtacctttgtcccgaaattcaaacaatcaaaattatgtctacatataccgaagatactcgtaaagtaacgactcaccgcctgatggaaatgaaactccgcggcgaaaaaatttcgatgttaaccgcctatgacttttcaatggcgactcttatagaccaagccggaatcgatgtcattctggtaggcgactcggcatccaatgtaatggccggaaatgtaacgactttacctattactctcgaccaaatgatttatcatgggaagtcggttgtcagagccgttaaacgtgccttagtcgtcgtcgatatgccattcggctcctatcagggcaattccaaagaagctgttgcctcggcaatcagaatcatgaaagagacgcatgccgactgtgtaaagatggaaggcggagccgaaatccgtgaatctatcgagcgcatactcagtgccgggatacccgttatggggcatttaggtctgacaccacaatccattaacaaattcggtacatataccgttcgtgctcgtgaagaggcagaagccaataaactcatcgaggatgctcatcttctcgaagagatagggtgtttcagtcttgttctcgaaaagattccggcagcattggccacccgggtagctcaggaagtaaccattccggtcatcggtatcggagccggtggtggtgtagacggacaagtcctcgtcatgcacgacatgttaggcatcaacaaaggtttttccccacggttccttcgtcgatacgccgatctaagtacaacgatcaccgaagcggtacaagcctacgtaaaagacgtgaaaacacaagattttcccaatgaaaaagaacaatactaactactgtcattggagaaaaactacgtttcaactaattattcgataaaattcatcacgaacatttcataaacaattattttcatgattaagaatcgcaattattcactcgatttattgagagttattgcctgttacttggtcattcaacaacatgccagcgaattttactatataggagaaggaggaacggttgttaccggaagcaatactttttggattggtatcataaccacattatgccgatcatctgtacctctattcgtcatgctgtcgggattcttgttactccctatgcaagacaaaatttctacattttttcgcaagcgtttcacccgaatcgtatatccattcatcgcatggtgtgtattatatgccggatactacgtattaagccgtggggattcttttagccaaatggcacttaatattttacacattcctgtgaatttcgggtgtgaaataggtcatttatggtatatttacatgttaatcgggctctatctggtaaccccgattatttccccctggttacaacaagcttctaaacgagaactggaaggatatctcggcttgtggataatcacaacttttctcccgtatattcatttagtttatcccgaagtgcttggcgaagcattctggaacgacacaccgttgctctattacttcacgggattcatcggatacttcattttaggatattatctgaaaagattcggctatccttctgcggcattatcttggataatactcatagtcggtttcgcgctctcggccgggattttctgttcacgtatcgatacggttcccactgtgcccgaattggagcttagttggggattctgtacggtaaatgtattcctgatgacattaggcctcttctctctaatcggccgattatctttaaaagggaaaaatgcagcctgcaaactgctgtcggatatatcgataaaaagctatggaatgtacttagcccacattctgtttctaaatttctattatggactattcaagtctatctcggatgcggcctatgtcacaattcccttgatcgccgtgtgtacatttattacggtttacatattcgtatatttgttatcctacctgcccaaaagcaagtatatcataggataatttataaaacctgtcatcaataataatgccgcttctgataagaaagcggcattattatttttcgcagagaacgagctccttctcattcttcgtttttctttaacaagtcccgaatttccgacaacaatttcacctcttcggaaggagccggggcaggagcaggagccgtttgttcttcctttttcttttccgttaacttcgtcaaaagtcgaataaacaagaaaatagaaaaagcaataatcaaaaagtcgaaggttgcttgtaaaaaattaccataattaagtgtaaccgcagcctgttctaccccatcgactacttcaggccctttcatcacccattttaaatctgtaaagttgacaccgccgatcagtaacccgagaggtggcatgatgatatcggcgacaaccgaagatacgatttttccaaaagcgccaccgataattacaccgacagccatgtcgatgacattgcctcgcatggcaaattttttaaagtctgctaaaaatgaacttttcataatagtacgagttattaatattagatagattactcaaactcaacacaatgcaaataaagaaatttttcttttattttcacattcacatacattgtattcaaaaaaaatatttacctttgtatcgcaattttaggaacaaaatatacttgtatgaaatacaaaattgcctttttaattgcgctgcttgctttgatgagttgttgtgcgacaccttgtggttgttaaacaatattacaaatgtaaatgtttttaagaaagcagaacaaaaaaagaagaaaaaagtaagatgttattttttattcaataaacacttaaagttttattacaatgattaaagtaggtatcaatggttttggccgcatcggacgtttcgttttccgtgcagcacaaacaagaaacgacatccaaatcgtaggtattaacgacctttgcccggttgactatttggcatacatgttgaaatatgacactatgcacggacaattcgatggaactatcgaagcgaatgttgaaaaaagtcaattgattgtaaacggaaaaactattcgtgttacagccgaaaagaatcctgccgatttgaaatggaatgaagtaggtgctgaatatgttgtagaatctaccggtcttttcttgaccaaagaaaaagctcaagctcatatcgaagccggtgctaaatacgtagttatgtccgctccttccaaagacgatactcctatgttcgtttgcggtgttaacgaaaatacttacgttaaaggtactcaattcgtttccaatgcttcttgtacaaccaactgcttggctcctatcgccaaagtattgaacgacaaattcggtattctcgatggtttgatgactaccgttcactctactaccgctactcaaaaaacggttgacggtccttctatgaaagactggcgtggtggtcgtgccgcttctggcaacatcattccttcttctacgggagctgccaaagccgtaggaaaagtaatccccactttgaacggaaaattgacaggtatgtctatgcgtgttccgactttggacgtttcggttgtcgatttaacagttaacttggctaaaccggctacttatgcagaaatctgcgctgctatgaaagaggcttccgaaggcgaattgaaaggcattctcggttataccgaagacgctgttgtatcttctgacttcttgggtgatactcgcacttctattttcgacgcaaaagctggtatagctctgaccgacacattcgtaaaagtcgtttcttggtatgacaacgaaatcggttattctaacaaagtactcgatttgattgcccacatggcaaaagttaacggataattctatttctccgataaaaaagaaaaaggctgaacagtttgttcagcctttttctttaatccgacaggtacaccctcgtcatataccccgaaagtatccttcttataccacgccacacctttcggatcacccctctgtttatatcatacatatataacaccgtaactatccaaaaagttattcagcacaggcaaaatctcgccgatggcctttcccatatttccaataattcttaccggcatatcggtatattgaggctctataccgcacatcatcgacaccgctttatgttctctttccactaattcgatttcacacatcaacatataagccactccgtcgaactctatttcattctcatacctcaccctctttcgtggcgaattttcccgttcataagctaccaaccaatgtgctgccgctaatgatgccaaagccggagcttcccattcaatcgttctcataacttctcctattctgttagcacacttccatcagggtatattcacactgcatttacccgttttgtctgtgtatctcctccttttgtttacaatttttataggcaatataccccgatggaacatggctaactatgttaattactaatctattattttgtttttcaaaaaaagtctatacctttgttttggtaataaaaccacacaaatatactaccacttttattgaaaagcaaattatttatggtaattttaccatattatgaaaataaaaaagtgaacgactatggagaatgaagctaaaatagagagaatcaagacattaatggaaaactttggagtaacccagtcggaatttgccaaacgcatatcgatcgatgcgtccaacttctcgaaacacctgaccggaaaactacctgtcagcgactcacttatcaacagaatcgtcgcagacttgggcgtatcgaaagaatggctatgtacgggtaaaggatatatgtttcgtccctcagacaacgatgcacactctcatatacgcacattaactcttccctcggaagcgattataccagaagcaagaaatggggcgaaagtatacggtctggacgtaaccgccggtaatttggcgcgggatcgcatgtttaccgaggatttggtaatcggcagtatagacgttcctttcatcaatcccgattgcagcattgtcaaagtaagcggagacagcatgaaacccgttattaacaatggtgacatgatcgcaatccgcgaaataaaaaatccccagcttatcttctgggggcaaatctacgtcatattgctggaagattaccgcatggtcaaatatattcgtaaacacgataatcccgatagggttatcctacgcagtgaaaacaaagaatacgacgacatcgaaatcgagaaaaaagaaatttgcgatctgttcattgtcgaaaacattatacgcatagacagccgcatttaatgactacgagaaatatatatagctcgcccacaatactttcacgaaaattatgtcaacattggaagaaataaccatcgccatgtcccacgaggacttcgacacttggtcgacacttacggtcggattcaactacactaaaagtctggtcatctgtctgaccttttacgattataaaaatgtacaacatcatgcctatgcgataatcgaaaaagacgaagcaatggctatgtcggaacaactcaatgtaaaattaaccgacttaccccaaaccatatgcaaacattgcggcgacacgtcgtatgtatttgtgccgtctcatgtagaagaacttttcaaagatgtactggatttcatactcgactgcggcgcacattatcgcatatcaagagattaaagattacccccaaatatagtctccattttttcaaaaattcaggctcaacattctgtctgtcaaaacaaaaacacccgaacataccgacccgacaaataaaatttgtttctacattcgtttatactatctttgcaaatacaaaaatagggtgcgacttggtataaaaaacgagcttgtccgttttatcttattcctatctctctctatttttataaaacaatcaaacccgccgtcactccaatgagaaagttgttatatatcgttctgttcctatccgtcgggaaacatttgcaggcgacaaattacaattgtcacaccgaagcgggacaactacaatctctcatcgaagaacagcatcggacaattacgaatctaaccgtctcgggaacaatcgacgttcgcgattttgctttcataaacgactccctatttcacttaaccggcataaaccttgcagattgtacgatagatgcattcgaaagtcgagatatttacctcggaaatcaaacccgtttcgatgccaactgtatcccagcaaacacattcttcggatttcaagagttaacgaccgtacggcttccccagaatacaaaaaaaataggaaaaggcgctttcgcaggctgtactaaactaaaaaacatagattggggaaacaatttacaggaaatagcaggattcgctttttgcgactgtttctctttgaacacatcgttaccacagacattggaaaaaataggcgaatatgcattcaaacaatgcacctcttttaccggaatagacctctccctgtctgtccttcgttcgatagggaaccaagcatttctcaactgtaccgccttatcctcgataaccctacccgcctcgttacaatctatcggcaaagaatgttttgccggatgctcgtctctgacgggaataacactccctcaaaaactagaatctatgggcgaaggttgtttctcccactgtatctcgttaacagaggtcgatataaaagaatgtccattggaaaacctgcccccttacacctttgaccattgtacaaaactactctccatacaagcccccaataccataacagaaataggagaaggcgcattctattattgcacatcgctcaccgactgtattctaccagagtctgtccgaaccataggcgattatgcatttgccggatgcagtaggatcgcaggactttctttcctgcccgaaggaactgaaaaaataggtcgatggccgttctatggtatgaaatatttattttccgcaaaaataccgtcgacagtcaagaccatcggagaccacgccttcgataattgcacgagattgaatgttatgttatcctatccgaccgagcctccgatactgggagaaaatgtctttcgaaatgttccgcaaaaagattgccggctgggaatccccgacgaaagtctatctctctatttgaacacgcctcaatggaaagagtttgacattcgttatttatccgaggtagatgagcaacaaatcgacgacaaggcgttgaaagcatatttcgagcaaaaaatgctcatcgtaaattcgtacgaacccatgcaccgcataaccctgtatacaatcgacggacgcacaatatatcaaaaacaaggcaaaatgaccgaagcgaaaatcgatactcaatcgtattcgggagaagtatttatcttttctgtacaaatagaatcaggaaaatactatcatttaaaattaggaagagtcaattaaccagaacctgtcgatattcatttcaaaatgggaaaaaataaactgaaaaaattcgacgacctgcaaggctacccacatgtattccaatatcctttctctgcactacaagaaaaaggatttgagatgcaaggcaaatggggaaaacaattcttcaaaaatgaaaatccgatagtccttgaattgggctgtggaaaaggcgaatatgccgtaggtctggcaaaacgttacccgcaaaaaaactttataggaatagatataaagggagcccgcatgtggagtggagccaaacaggccctcgaagaaggaataaataacgtagcctttcttcgtaccaatatagagttgatcgatcgtttttttgccaaaggtgaagtatcagaaatatggattaccttccccgacccgcaaatgaaaaaagtgagaaagcggctcacttctacccggtttatgcaactataccaaaatattctatcgcccgaaggtttgatccatctgaaaagcgacagtccgttcatgtacacctatacttgtgaaatggtaaaagcaaacggctatcccgtacaggtttcgaccgacgatctctaccattcgggaataaccgacgacatactggaaataaaaactttctacgagcaacagtggctcgaacggggcatgaatatcaaatatattcgtttcgtctgccaaccccgtgaacaattcatcgaacccgacgttgatattccttacgacacataccggagcttcaaccggggaaaacgtagcggtaaacaaagtagtcaagaaaatacaacatcaaaataacacgacaatatgcaactatatccgaaactaatactcgacgcactcgccaaagtgcgttacccgggcaacgggaaagatttggtcgctaatgaaatgatcgaagacgacattcgtatcgacggtaacaaagtaagtttctccatcattttcgacaagccgaccgatccttttatccgatcggtcgtgaaagccgccgaaactgccattctcactttcgtaagtccagaagtaaatatcaaaggaaatatagctgtaaaggcaagacaaacagctcgtccgaaccccgagaatcccttgcccgatgtaaagaatatcattgccgtttcatcgggaaaaggcggcgttggtaaatctaccatagcctccaatttagctgtggcgttggcccgccaagggtataaagtcgggctgctggatgccgacatattcggcccttcggctcccacgatgttcaatatcgaagacaccgaagtctataccgagaacatcggaggacgcgacctcattctcccggtcgagcgatacggcgtgaagattctttccatcggtttttttgttcgtaaaaacgatgccgtactctggcggggaggaatggcaagtaacgctttgaaacaactcatcaccgatgccgcatggggcgaactcgactattttgtgctcgatttgccaccgggaaccagcgatatacacctcactttggtacagacactcgctatcaccggagcgattgtggtaaccactccgcaagaggttgctttggccgatgcccggaaaggtatcagtatgtttaccggggataaggtaaacgtccctatactgggattggtcgagaacatgagttggttcactcctgccgaactcccggaaaacaaatactacctgttcggtaaagacggagggaaacgactggcccaagaaaccggagttcctcttttgggacaaatacctattgtacaaagtatctgcgaaagcggtgatgcgggacaccccgtggcactcgacgataccattaccggattagctttcaagcaacttgccgaagccgtcgtaaaagccacagaggagcgcaatgcaactaaaccctctacacaacgggtagaagttcataaataaaaagcccatacgacaaagagccgctataaaatttatagcggctctttgtttatatagatttgggctcaatcgataatcaatggggattgttcagtgtttccccctatactatttcacagaacaccccataatgctacgaaacacggctggggagaagggagaatacccacaaagttccgaaagggtaaaaagctgttcaaaacgacactttcacccctttctctctgtgtagctcataaaatcgaagcaagggagaaaaaggaatacatctcaacctctcccccctgtgttcccgtaagggaatatagggggagtgcccacagggcgaggaggttaaagacccgacataaaccgactgatgaaatactgtttccagctcctccgtcacttcgtgacacctcacctatatggctaatgccacaccccgtaaggctacggggcacggcaatggaggaggtcaatagcaaactatcctctccaaaagccggacaagctcaacctaaccggaaacgtttctcctcatagctagcggattaagtccctctcattcatcaacattcaagtctatccccatgaattttctactgaacatagactcgttgcaaacattaaacagacaacaaccgagcgatcgtctccgggtaaagttcatgttcgaccgcatgaatgagtccgaataactcatcgatatcgtttccttcgtacgggatagcccgttgggcgataatccgtccgccatctaccgtacggtccacataatgaatagttactccgaacactttcaccccgtactccatagcttgttctacggcacgagctccgggaaaagcggggagcaaagaagggtgtatattaataatcttaccgccgtaacgcgataacaatgtatccgaaataatccgcatatacccggccaaacaaaccaaatccaccccgttctcatcgagaaaatcggcaatgacggtctccatttcgaccttagaagcaaaagacttagggtcgaaagtgaaagacttcataccatgacgtgaagctcgttctacgacacgagccgaaggtttatcgcaaaccaaagccactgtttcggccgggatcttaccctgctcgcaagcagtcacaatcgcttcaaaattactgccggttccactggcaaatacggcaagacgcttttttcgggacataaattcttttttagaatgggaacaacaaaggtaaaataaaaatcataactatccccataataatctgtaaaggcaaacccacctttacataatccatgaaagtatactgaccggcaggcataaccagcgcattgggtggcgtagaaaacggagaagcgaaacacatgctcgcccccacggcaacagcgaataaaaacggataaggactcactccgatctgtaatgcggattgcatggcgataggagccaataaaacggctgttgccgtgttactgatgaacatcgtcatcaatgaagtcgtaaaatagataccagccattaaagccaaaggcccgtaaccgcccaaaccactaaccaaactattcgatatatattccgatgctcccgtcttttccaaagccaacgacatgggaagcatggcggcgataagaacgacactctcccagttaattgttttataggctgcctccacattcctgaaacaaccggtcaataccataagtatcgcagcaatcatcacagccgtaaccggagccactggtatagaatcgaacaccatcataagaatcattaaaagcataatcgcagcagcaatcggtgctttataatcgagagtaactttcgcggcttcgctcaacggctggccgagtaccacccaatcggaatcttccgaactcaaccgagctatatccttccatgtaccttgcacgagcaaaacatcgcccgacaacatcttcacatctttcaaatcatgcaatatataatcgttctttctccttatgcccaatacattgacattgaatttttcccgaaatcccgaatctccaaccgtctgtttcaacaaacgtgacgagggcatcaagacaatctcggcgatacctatgtcataaaaagccaaatcggaagtcaagttacccttaccgtcttcgatggtatgggcatccaataataccaaagaaaatcgagaaacaaactccctcactttttcgaaatcgccattcacatacaacacatcgccggaacataatacagtacccggatcggccaatttctgattgaccgttttcaacaaccgggactgcgacgaaacagtgcgccgtacctccaatatattcaaatgatattgttggcgaatattcaactcgacaatcgttttgccggcaattatcgatttttcggggatttgtatccgaaacaaattctcggaaagctgatattctcttgccaactcgttcaaagatttattcttgtttttaccatcagacttttcggttccccgtttggtcaggaaaattttactcaaaggcatcaatacgaccattcctacaaaaacacaaatcaaaccgaccggcaagaaagaaaagaaagtaagcggttcaaaaccggcattggtcaaggcattctgtatgacaaggttcggcggagtacctatcaacgtcatcatacctcccatactgctggcaaaagccaaaggcataagcaagcgacttgaatttatatgagcgttggcagccagactcacgacaataggcagcatcaaggccaccgtacccgtattactcacaaaagctccgatagccgaagtaaccagcatgaccaaaataaaaagtcttgcctcgctctttcctgccaactgcaatatctttccgcttatcatcttcgccaacccggtttggaatatcgcaccacctactacgaaaagaccgatcatcataatcacgaccgaattggagaatccagacaacgcctcatcgggagtaagaatatggaaaagcaacaacaaaaccaaagcgcacaaggctaccacatcagagcgtattttaccactcacgaaaaacaccgccgataaagctaaaattattaacgttacaaccattcaatcaattttttaatacacctatatcttttcttgacaggaataacaatcatgaatcaatccgtattcccttatttcacaatttatccacacaaatttaagaaaaattttcaagtcagtcaagctctgaatttcttaaaaagacttgtctatcaaacatataacaatagcacccgaaaggctatgcagacagtctttcgggtgctattacccttttggggaaaatacattatttcacttcccaagtctccccggtcaacaaaaattcacgcaaggaggaataaggtactttcgaggttacctcttttacttgtctatccacctcttcgtcatatacgggagcctccacattacgaatcacacctattgccaaaggcagttcatgtccgtccatcatcgcaagactttgatgcaagaaattatcgggagacttggcatcatgtaccaaaatatcatcgagagtcacaccgttctccccgatagtcacagcctttaatttgtaaccgtccaacacgaggcctcgattattgtctttcccgaaaatcatcttttcaccatgacgcaaatgaacagtccggtcggcacgaaactctttatcagccacataactgtgaatattattattgaaaatcacacaattctgcaacagctccaccaccgacgttcctttatggcgggctgcttctaccaatacttcttgcgaaacagacatctccacatcgagcgaacgagcgaagaatgttcctctcgccccgaaaacgagttctgccggaatgaaaggatcttccaccgttccataaggagacgatttagtaacgaaacctcggtcgctcgtcggggaatattggcctttcgtcaaaccgtatatcttattattcatcaagaccacattgatatccacattccgacgtaccgaatgaataaaatggttcccaccgatagccagacagtcgccatctcccgaaatctgccataccgtcagatcgggattggccgtcttcaccccggtagccacagctgcggcacgaccatgaatcgtatgaaaaccataggcattcatataataaggcaaacgcgacgaacagccgatacccgaaatcaccaccgtttcgtggggaggcactcccagtgtcgccatagctctctgcaacacagccacgatagaatggtctccacaacccggacaccaacgtacatactggtcgcttttaaaatcctttgccgtatattccttttgttcttccatatcctattcctccaaaagctttgaaaaatgcgccatcaactcactcaccatgaacggctgtgcctgaattttattatatcgcaagaaattcacacctggaactttccctgacaaatacgatgcaaactgcccgttattcagctcgcaaacgaccacttttttatatcgccgtaatatctcctcggtattcgcgggcaacggattgatataattgaaatgagcgaaagccacaggtttcccttctgcattcatagcttccacggcagaatacaaatgcccgtaggttccgccccaactgacaaccaataaatcggcagaagaatcgcccgacactttcaacaaaggaatatcggtggctatgctgtcgattttctgctgccgggcacgaaccatcttttcatggttgatggggtcagtagaaattgcgctagtcttataatccttttccaatcctccgagccggtgcatgaaaccctctgttccgggcttcgcccaataacgtacggctttttcgttacggtcgtatggtttccacgtaccttgttgttccggcatgacataattgggctttatctcgggatattcatcgatttccggaatacgccatgccgaagagccatttccaataaatccgtcggtcaacaagataacgggagtcatgtgctccaaagcgattttagccgcttgaaatgccatatcgaaacaatcggtcggtgtagaggctgccaccactaccaccggactctcgccattccggccgtataaagcctgcaacaaatcggtctgctcggttttcgtcggcaatcccgtagacggcccacctcgctgaacatcaataatgaccaaaggcaattccgccataacggccaaacctataccctcgctcttcaatgccaaaccgggccccgacgtggaagtcactgccaaatttccggcgaacgaagccccgatagccgtacaaacaccggctatctcgtcctccacttgaatagcctttacgcctaaatctttccgcttggccaactcatgcaaaatatctgtggccggggtaatgggataacttcctaagaacaaaggcagtcccgacttttcagatgcggctatcaacccccatgcggtagccgtatttccgttcacatcggtataaataccgggcttcacttgcgcagactctactcgataggtcgaaaccgaagcatgtatgttattaccatagttgtagccgtcgcgcatcactttcgcattagcctcatagatagccggcttcttggcaaatttatttttcaataaatgttgagcttgttccaaaggacggtcgaacaaccaacagacaagccctaaggcaaacatatttttacaccgtacgatagacttgttgtctaagcctgaatcggccaatgaatctttcaccatttgggtaatcgctaccggaacgatttgtgcatgagaaaggcccgcctcttgaataggatcgtccgtcgtaaacgccgccttctccaaatcgctggcccgaaagctatccgagtcgataatcaccacaccgccttttttcacatagcgagcatttgtttttaacgctgccggattcatggcaaccaatacatcggccaagtctcccggagtgtgaacacctttccctatatgaacctgaaaaccagacactccccctaacgttccttgcggagcacgtatctctgccggataatcggggaatgtagaaatttcatcaccgataccggccgaaacattggaaaagatattcccggccaattgcattccgtcaccggaatcgccggaaaatcgtaccacgacttcttccaatactttcacttttgttttttccgtcatgtttatattacaattttaatccaacatgatatatttcaattccaatattactattttagcaaagatagtgtttttttgtaagcatttgaaatattttcatagaaatatgtaagctccctatctattcatcattttaaaagctgttccgataaaaacaaagatcttttcaaaacatcgacataaaaagagccatatcataataaggcaatcccaatcgtatgctcaactccttataagtcaactttccaccgaacaaatacacggcattccgaagtctttcgtccgacttaatatggccatagagcatggcagggtcattcaaatcgatcaataccggaactaataaattactcaacgccatcgatgccgttcgggcaacggcagatccaacgctcgacaagcaataatgcaaaacaccgcattgctcatacactttattacaaggagcctcgctacaactcgacgtttcgaaacagcctcctttatccatacacaaatcgaacaacaatgcccctcgtttcatcatctcgatatagcttactcctaaacggcctccctccggcacttccgtgccaataaccacatcggccgagcgcatggcgttttccaagacatgagggtgcatattggaagtaaagatagaaggactcacttccaactgagtagcttttaaacgataaaaatcattatcgaataccctcaccaaagcacccaatccacaagcggcacgagccgccgcacggcctgcaaggcctcctcctataatcaaaacctccgaggaggcgacccccgggatgccccccaacaaaacaccctttcctccactccggttactcaacaattccgaagccaacacaatggctgcacgaccgtcaatttcgtccaatatatcggcaaaaagataacggcctcgctcatcggttatcaaatctatcgcgactgccgtaactttcttttgcatcaatatgcgcacgaccgaagccgattgatattgaagctgcaacaacgtgagcagaaacacccccggatgtatcatagcagcctcctgttcattcaacggagtaattttaagaacgacatcgcatctgaaaacttctgaggctgttgtcgcttgcgccccagcctcggtataatgtaaatcggaatacttgataccctcgccggctccgctttccacaaaaacgcgatacccctctttggtcaacaaggcaaccccctcgggcgtcagagggaatcgtttttcccctccgttatgttccgccggtaaccctatggacaaacgtctattaccggccatcgttcccaacaattgttcttggggtgcgacccctgcattcgatttacaagcaaagctaccagccataaccacgaagtttaaatttataaagacgaatttacaaatatacttcggtaaaaaccagaattatatatttatatttcatcagctccatctccataagcaggattttgcatcaagacagccagccgatgcacagcctcgtcgaccgaatcgagcgattcatacccgtcggcatcgaaacgataatcggcttgccggtaataagactcgcgacgattcaacatctcggtaatgtactcatacagttcctccggcgttttacccgccaccaacgggcgttttacttttgcatgggacaagcgtctgcacaacgtctgtacagaagcggccaaataaatcgtgactccccggtgacgcatgtactccatgttatcgaaaaaacaaggcgtgccaccgcccgtagcgaccaacacattgtcaaactccgctacctcatgcaacatacgacgctctatatccctgaaaccctcttctccccgttcggcaaacaaatcggatacccgtttcctgtatctagattcgatataagcatcgaggtcgataaactcgacattcaaaagctgagccgcccgacgtcccaatgtcgtcttgcctgccgccatgtatccaaccaaaaacaaaggcttcatttcttaaaagtattcgatatcgtatttgtctctgtctgcccgttagcgaccagagcatcatgcttcgctctccaagtctctccgaactgtcgaaattcaaactccgacaaagagtgaatcaacgcctgtttatccgcctctttcaaaggcgactttgcaataaagtccaaagccgtttgtttcccctccaatcccgatagcaagaccgatttgttcaacagataatccatattcgccggatcctccgttaaataactctcatacaaagacaaggcctccgacagttgtttctcggcatctgcctcgtcaccccggtcataagcgataaacccttttaccgtataaaaataagccttcatacggtttttccccgtttctcctattttttcgatagcggccgaagctgtccggtaagcactgtccggacgccacaaattcaactcgttcaacaccttcccgaaatatacatctatattttcgctgtcggcatcaagagcttgctccaataatctctgggctgccagacaatcatcgatagtcacggaatcgctccccagcaaaactatcgcttctttatataaacgcacactttcctccttgtcgctcttgccgggagcacacccgatcaggccaaacaagactaccgataaaattccgtatataccaattcttcccatcgctattcgattatgccacggagaatcggcttatcggcaacataaaagaagcatcgcacaggcttatctccgctaacgtgcgtaaagatacgacaatttttatatttttgtacccgtcatttataacgataaccgaatcatggccaaatacaaatattatgtcgtatgggaagggcgtgcccgtggaattttcgattcttgggaagaatgcaaagaacaagtcgacaatttcaaaggagcgaaatacaaaagtttcgacagtctggaagccgctaccgaagccttccgcaatgcccccgacgattatttcgatgtcatgcgtaaaataggcgaacactcccgtgacaaactgtctgctcccatcttacccccttcggttatcgccgacagtctatcggtcgatgcggcttgtagcggaaaccccggaaaaatggaataccggggagtagacacgaaatcgggaatcgaactgtttcatgtaggccctttggagcaaggtacaaacaacataggagagttcctcgccctcgttcatgggttggcctacttgcaacagcgagactccgatatacccatctattccgacagccgtaatgccatactatggattaaacaaaaaaaatgcaagaccaaactagcccccaacgcagccaatgctcccatattcgaccttatcgcacgggcagaacgctggctgcatactcacgtctatgccaataccattatcaaatgggataccgagaaatggggtgaaatccccgccgatttcggcagaaagtaaaaggaacggttacaagatacaaacaaaagaaccctgttattttccggattcaataaaacggggcggtatgattttttttcatactgccccgttttatatacgatttaattcaatccttaatcgataatatcgaacccgcaataaggaaccaacactttgggtatctttatacctttgggggtctggttattctccaacaaggctgccatgatacggggcaatgccaaagcgctaccgttcaacgtatggcacaaatgcgttttcttatcggctccacgataacggcatttcaaccgattggcctgatagctttcgaaattggataccgagctgacttccaaccaacgcttctgtgcggcggaatatacttcgaaatcgaatgttatggccgaggtaaaactcatatcgccgccacacaaacgcaaaatatgccacggtaattcgagacgttccaccagactctgtacatgagctttcatctcttccaaagcttcatacgaatggtcggggtgttgtatctgcacgatctccactttatcgaactgatgcagacgattcaatcccctcacgtctttcccgtacgaaccagcttcacgacggaagcaagccgaataagccgtattcttaatcggtagatccgattcattgaaaattacgtcacggtagaggttcgtcaccggaacttcggctgtgggaataagatacaaatcgtcttcgttgcaatgatacatttgaccctctttgtcgggtaattgccctgtaccgtaaccggaagcggcattcacgacataaggaggttgtatttcgaggtaaccggcctcgcgagcggcatccaaaaagaacgaaatcaaagcccgttgcaaccgagcgcctttgcctttatacacagggaatcctgcaccggtaattttcacacccaactcgaaatcgattaaatcgtatttcttagccaaatcccagtgcggaagcgcatcggcgggaagttcgggaatcactccgccggtcttttccacaatattgtcttcggcagtacgaccttcgggtactccggcatacggcaaattgggaacagtcaataaaatatcggtaatctccttttctgccgacaccatcgactcttccaactctttggtagactctttaatggttgctgtcttcattttcacagcttcggcttcctcttttttaccggctttcataagctgtccagtctgagccgccaaaactttcaattcggccaacttcccgtccaactcggcctgagatgcccgacgtattttatctaattcaagaacccgatttatagcttctttgccatcgaaatgtttaattgccaaacgacgaatcacctcttcgggattctccttaataacacttagtgtaagcatagttcaattcaaatatttattctgtattaagccaacagttcttttactttcgcagaaatagcgcggccatcggcacgccctgccaactgtttggtagctactcccatcacctttcccatctcttgcggagtagtagctcctacctgagcgataatcgctttcaacgcttcggtcaactcttcctcggtcatctgcttcggcaaataagtttctatgacagctgcttcggccaattccggttcggccaaatcgggacgattctgctcggtataaatctgagcgctttccttcctctgcttcaccatctttgccaatatcttcatcgccatgtcgtccgtcaattctccgtcggcgcctttggctgtttttgcctccaaaaactctttcttaattccccgcagggcttccaatctcactttgtcttttgccagcatggcacttttaatgtcgttgctgacctgatcgaataaattcataatcctatatctattttatagttttcgattaaaaccttatggtacgacggccactaccgttactctcctcttttttctccgaaccgtcgaaattatcgcgaaaatctttcggacggtcataagcgggtgtcttatccaacttttctaacaaatcgttatcatcgagttgatcgggtttcaaaacaatatattgcgattgagcgatatgctcgtcggcatcaccgccatattcccctttgaacgtcaagtcagatacctcgaatcccgtagccaaaatggtaattttcaaggccttgcccaaagaagaatcgtgagtatatccccaaataacatttactttcttcttgaaacgcaacataaactcgctcaactctttggactcctgcatacgaagctcctccccctcttcgggtgaaaaatagagattgaacagtactcgttccgctccataaatatcgctctcttttaaaagaggagaagtcagtgcattttggatcgcacggctcatgcgatgctcaccctcgccagatccggtactgattacagcagctcctccgtctttcagcgtcgtgcgtacatcggcgaaatcaagattgatttttccatctttcgacaccagctcggctatactccgggctgcattcgacaacgaatcgtccgctttggcgaaagcggtcgtccaagaaagatcgggatatatcttacacaatcgctcgttattgatcaccaacaaagcatcgacatgcttccgcatttcctccacaccggcgaaagcctgtaatatcttcggttctccttcaaagagaaacgggattgtcacgatgcccactgtaagcacacccttctccttagcaatacgggcaaccacgggagcggctcccgttccggttcctccgcccattccggccgtaataaaggccatgcgtgtattatcatcgaacaaggcttcgacttcggcggcactctcttcggccaatttcttagcgacctccggaatgtttccggctccctcacccttagcacccaactgaacttttacaggaacaggcgaatttcgcaacgcttgtgcatcggtattacaaagaacaaaactgacaccacctataccttgatggtacatatggttcacggcatttcctccgcctccgccgacacctatcactttaatctttgccggttcgtcctgttttttttcatcagctccgggaacaataaaatcgggtaactgaggattatttatatctaattcgttcatgatgttctccatttaaaaattatcgttttcatcatcgagcaggttttcggccttcttcaccatctctttcaattttccgaagagccccggccccttcactttctcctctttttctcgcttcttacgttccttttcttctcgctttgcatctgcggcttcccgtttccgacgctcttgttctgctttctcctgtgccttctcttgcgcccttttctcctttgggctcaacggctttacttcttcatgcggctcgtcttccggctcatcgacaaccttaggtaaaacttcgacacaattctcttttccgcaataaagcaaccccagaatctgcaaatagtcagcactcttcgattgagaagccacatctaacaacatatcctgacgaagagctcctttcctcacacgaatatcgcacttctctgcgataagttccgccagattggacagtttggatgcacctcccacaatcaccataccggctcctaaacttttacggtcacatttcgcatactcgaagtgagcattgacattggccacgatttcctcgatacgagctttgactaccttcgacaaatccaaactttttatttcagacgaactctctccccgaagcgtaatgttcgattcttcacccattaccttagcagaacccaaccgcactttaaacgactcggcctccggttcggtaactttcaatgtcataatatcgcgggtaatgttataccctcctaatggtatcgtagaaagatagcgcaaaagcccgtccttataaatcgaaactgtcgtcgtttccgcaccgaaatcgaccaacatgactccagcttggcggtcttcgttactcaacgccacataagcagtagacaacggagtaggaatatagcgcactatcgaaggctcgccagagaaacaacgggacacactttttttcaaatcgtcacgagccacgatcaacttcaaactcattttcagattcgagccctcgatttcttctctgcccgatttaggtttatcatcgacaagtactccggtacgaacgacctccaatatatcggctccggcaataggcatttcccgggcttcctcctgcaagcgtttgataatgtcctccgtaatgggagttccttcgggataatctcggcttatcatgtggtcttcggcatgtaaagattgtcccccgattcccacatacacctgtttgatttttttcgaagcgcctatacggttattcaatttccgtatcaaacgtttcactttcgatgaaacttcatcgggattaacgacgaaacctcgcttcacactcccggtcaatggttcggtatctactcccagcacagtaacgactcctttcagagaacgagttcctatcgcgcctgtaatcttcgagcttcctatctcgacagctactatgtatctttccgtatccatatatattgttacttttatttcattttttctttcgggtacaaacgacttgattcttaaatttcaacgaaaccgtatcgtacatcgcccaaccagctttactgaatacctttttataaaccagcatcaagttatccaatttcgtttcaaaatcctgtaccgagcccaacaaaatggtttggcctcccactctgggaaccaactctacttcatgacgctcattgacataaatttgttcaatttgagcattccaaaaccgatgattataaatataccgagccaacggcaacatatcccgataggtcaacacactgtccactcgtcccgtcaccaaaggtagatgcgcttgatattgagtcctgacagccatgcgctgcccctctgcatcgacgtagtaatttccgtcgtcagccatcacccgcataatcgggacacgctgtgtcacttccacacacacagttccgcctacttttttataacattcgaccgagcccaacaccccgttcgacataagtgtacgctccatcttttcagtatcgattcctcccaaaggcttcccgcaaggatccatctcgaaatcctcgatatagttatatacatcggctggtgagatataatgcaatacagcactgtcggttatctccacttgtaagtccctgcatttatcctccgctgcataggagcgtaaaaaaaagaacgagacaaacagataggataccaacactaccatcaacaaaaatctcaacagtactttcatttcgactctacgattgccgctatttcagggagcaaacggtctatatcgccggcccccgtcgtcaataaaatgtcaaagttacactcttttatccgttctaacaacttttcacgcaaacaaagttctttatttctgcatgttatcttgtcaaaaataagtttcgaagttacgcccggtatcggcaattctctcgccggataaatgtctaacagaaaaacctcgtcggcaagggacagcgcctcggcaaactgtggagcgaaatcgcgagtacgggagtacagatgaggctggaaaatcaccgacaaccgacggccgggataaagagccttcacagaacggatactagctttcaattcatcggggtgatgtgcatagtcgtctatcattaccctgtcgggacgtctcacccaaaactcgaaccggcgttttgctcccttgaacgaggccatagctctccgcatatcgtcgccagataccccattcaaccacgctatcgccatagcagccactgcgttttcgatatttatctccacgggaacacccagctctatatctgcgacactcccttccggcatcacaaaatcaaacacgatggttccgtcgcctatacgtatgttaccggcatgaaaatcacccccgtcacgagccgaataagtatatatttttacattctcctttacgctgggaaccagcttgatacctttcttcataatcaaacagccacccggctgtatcaacgaagtgaaacgagcgaaactctccaaataagcctcctcggttccgtaaatatccaaatgatcgggatcggttgccgtaacgacagccatatagggatgcagccaatggaacgaacggtcatattcatcggcctcgattaccgtaaacggcgactgttccgacaggataaggttactgttataattacgaagaataccacccaagaacgcattgcaacctatcggagattcatgaaagatatgagcagccatactcgatgtcgtggtcttgccatgagtgccggcaaagcacaggcctttgctcgattgcgtaatcagccccaacaactcggcacgctttaccactcggaaaccatgctccctgaaataaaccaatccgacatgacttgcgggaatcgccggagtataaacgaccaaagtcgtctcgggattccggcaataatcgggtatcgactctaccgactcttcataaacgatttccagcccctcggctttaagttcggtagtcaggggtgactgcgtgcgatcataacccgcgactttatatcccttcgccaaaaaataccggaccaatgcactcatgccgatacctccggctcctacgaaataaagagatgtatactgtttcattttttattgactatatcaaaaattatatcggctatccgggctgccgaatcacgctgcgccaacgccgcaatttcccggttcatcgaagtcagagattcctcatcgtgaaccaccgacaaagcacaaggcatcaaccgttggcgagcctcggcatcccgcacgagaatcgccgcgcctttcgacgacaaggcttcggcatttttggtctgatgatcttccgccacattaggcgacggtactaaaatcacaggtttcccaagtaaacaaagctccgatatggaactggctcccgctctcgaaataaccaaatcggctgccttgtaggccaaatccatgcgtgcgataaacggcatttgtttaatacaagtaggattgcctgctgcttccaataccattttagctcgttcgtcgaaccgttttccgcattgccaaatcaactggactccgcttttcacaatctctggaatagactctgccacagccgtattcaatgtcaaagctcccaaactaccgcctatcaacaaaataatttttttattcgggtcaaggccgaagaaagcggcagcctcggtacgagttaaagcctcattgcacaaatcctgccgtaccggattgccggtcagcaccaatttttcagcaggaaaaaagcgttccataccatcgtatgccacacaaatggtatgtgctttcgatgctaacaacttattcgtgacccccgcataggagttttgttcttgaatgagagtaggtacacctcgatgcgcagctgcccacaaagtgggaccactggcatatccgcccacacctaccgccacatcaggacgaaaatcccgcacgatacggcgagccatacgcagacttctccacagccgccacaacactttgaagttagccaacggattactccggttaaagccgcttacaggaagacctttaatcggatatcccgcagccggaaccttctccatctccatacggttatcggctccgacgaacaatatctcggcatcggggcacttcacctttattgcattggcgatagaaatagccgggaaaatatgtccccccgtacctccgccgctaatcaaaactcttatcgttcgcttcatattctttctatgctaaattggtaggattcgcagcctgcaagtcctccggtaaatcgttttctttctctgtttttattttctttccggaatctttcaccgcataacggctcacgctcaacatcacaccgaatccgaaactcatcatccaaatcgaagttccccccttactaatcaatggtaacggttgtcccgaaaccgggaaaacccccacgacgatagccatgttgaacaaagcctgcaacacgatcattaccgccattcccatgaccagcaatgccgggaaagccctcgtacaccggcgagctatcaaaccggcacgagccaaaatcatcaaataagctaccaaaaggcctataccaccgacgataaatcccaaatcttctatgataatcgcataaatatagtccgagaacgccaacggaagccgagacgattccctactgttaccgggtcccactccggtaattccaccgtgagccatagccatagccgcccgatgttcctgcaagttcttgtgcgtagtctctttttcatactcgggagtagggtcgaaaaagtctttcaagcggcttttccaagtcgatgaccggacgatcaccttatctccctcgtttctatcctgtaccgttacctcctgcgtctccggctgtgcttttacttccgttatcaaatctttcgcctgcatgacagccaaagccaagaccacatacaccaataagataccgaacaatttataaaattcgacacccccgatcagcatcatgcagacacttatcccgataaatagcaacgtgttggtcagcccctgagtaaacagcaaagcgctgaatatcgtcaccagaccgaccacccataaaacgcccttcatatttaccccgcgctttatctgggtcttcgccaaaacggtcgccatagccaacacaatcgtaactttggctacttccgaaccctgtaaagatactcccaataccgagatcgtacgttttgccccgttaatcgtatccccccagaaaagaatgctcacgagaagaacgatcgtcaaaggtatcatcagataggccaagaccttaaaccatttataatgtatctgggaagtgacataagtaatgacaaagccggagaaaagaagcatgatatgtttgatgatgggagaatatacgtcaccacccgtaatctcccggcttatcgcactgtaaacctcgacaaccgaaacgatatacaagatgataatgataccccaaatgtaagggtcgcttctccttttctctttttccgatacttctatttccataacgataacggttataaagctcgaacacaagccttgaactggtcacccctgtcctcataacttttgaacaaatcgaagctggcgcaacaaggcgacagcagaaccgtatcgcccggagtagccaaagcaaacgatttatccacagcctctttcatagagctcgcctcggttatataaggtacttttccctcgaaaaaagcatggagcttactattgtccacacccaaaaagactaaggctttcaccttgtcccgaaccaattgctctatctcggaataatcatttcctttatcttttccccctaaaataagtaccacaggtgttttcatgctttccagagcataccagcacgaattaacattcgtagctttcgaatcattgataaattgtacaccccgcaccgaagccacccgttcgagacgatgctctaccgactcgaaatcgctcaatgccttgcgaacatactctttcttcacattcaacaggcaggccgaaagaccggctgccatcgagttatacaaattatgccttccatgtaacgacagttcatcggtctccatcgtcaacttttcctcaggagtatcgatcgtcaaagctccgtcttcggtgtacgcttgcgtccccggctcgtgagtttcggcaaacgggtatcgctgcgacttcaaaggcaactgcgataatttctcggtaatcacgggatcgtcattccaatagataaacgcatcgtcttccgtctgatttcgaataatccgaaacttggcatcgacatagttctccattttataatcgtaccggtccagatgatccggtgtaatgttcaacaagatagctatatgggctttgaaatcatacatattatccaactgaaaactactcaattcgatgacataataatcatagtcgcaagtcgctacctgcaaggccagacttttccccacattaccggcaagtcccactttcaatccggcacttttcagaatatgataagtcaacagtgtagtcgtcgttttcccattgctcccggtaatgcaaatcatgcgggcacgagtataacgaccggcaaactctatttccgaaataataggaatattcttttcacgtaaagccgctatcatgggagccctatcgggaatacccggactcttgaccacctcgtcggcgttcaatatcaaatccggggtatgtttcccctcttcaaaggggatttcatatcgatcgagctgttctttgtatttatcttggataaccgacatatccgagacaaatacatcgaaccctttcacttgggcaagcacagcggctccgacaccactctctcctgcacccaacactacaattctttttttcttttccattttagaaccctttctatcgcattttcagcgtcactatcgtaatggctgcaagcatgatgcaaacaatccagaagcgaacgacgatcttcgactccggcacagcttgcaacggtttttgtatcaaagcgttgattcctgcattacccggtttttgaaaatgatgatgcaaaggcgtcatcttgaaaacccgacgaccctctccgtattttcgtttcgtaatcttgaaataagcgacctgtatcattaccgacaaatcttccacaaagaaaatcgcacacaaaatcggaatcaacaactccttatgtatacaaagagcgaacacggcaataataccgcccaacgtgaggctacccgtatcgcccataaacacctgagccgggaacgcattataccacaaaaaaccgattgtcgcccccataaaagcgctggcgaaaacgaccagttcctcgctccccggtatatacatgatattcaaatacgatgcgtacgctatatgccccgacagataggccaatatgcccaatgtcaaacccatgatggccgaagttcccgtcgctaaaccgtcgagaccgtctgtcaagttcgcgccgttcgaaacggctgtcaccacaaaaatcgtaagcaatatgaaaataacccaaccaccggtctgggcatgttcgcccaaaaacgggaccaaatcggcataatcgagattattattcttgaaaaaaggaatggtcgtctgggtagacttgatattttccgattcatattttaccacttcggtatctgctcccggcgtttgcacagccacattctcgcgaataactacatctggactcaaaaacagcgtcaatcccacgataagaccgagtcccacctgtccgactattttaaatcgcccgtgcaacccctccttatctttcttgaacaccttgatatagtcgtccaaaaaacctatggctcccagccaaacggtcgtaatcaacatcaatatcatgtagatatttcccagtctcccgaccaacaaacaaggtatcaatatagcgataataatgataatcccacccatcgtaggcgtgcctttcttggacatttgtccttccaacccgagatcacgcacgagctctccgatttgcaaaatttgcagcttattgataatacgccggccgataatggtagcaataaacaaagccaaaataaaagcgaccccagaccggaaagatatgtaggaaaacaatcgagcccccggaaaatcgaatgaagattcaaggtattgaaacaaataatacagcatactctttctatttcacagttattattaaattctctcttccgcgaacaatttttccacttcttccttatcgtcgaaatggtgtttcaccccctctatctcctgatagtcttcatgccctttgcccgcaatcaaaacgacatcgcccggttgggcaaactgcgtagccgcgcgaatcgcttcccggcgatcgacgatagcgagagttttacgacgctgttcggcatcgaggccctccaacatatcgttcaatatatcgttcgggttttcgaaccgcggattatccgatgtcaatattacccgatcgctcaaattcaccgcttcccgagccatcatgggtcgtttccctttatccctgtttccaccggctcccacaaccgtaatgatatgtcctctatttcccaagacgtcacgaatggaactcaacacattgttcaaggcatcgggagtatgagcataatccacgatagcggtataaccttttgaagaatgaagagtttggaaccttccggcgacaggaatcaataaactcatctttcgtaaaacttcttccggctcctgtcccaacaaacaagccgctccataaaccgccagtaaattataagcattgaatttaccgacgaacatcacttccacctctttcccgtttatttccagagtcatgccgtcgatacgactttctatgatccgcactctgaaatcggccaaagtccgcaacgaataagtatgcttttcagctttggtattctgcaacataactaaccccgacttatcgtcgatgttagtcaaagcgaatgctcctttgggtaacccgtcgaaaaacgattttttagctttcagataagcctcgacggttttatgataatcgatgtggtctctcgttagattcgtaaaaatcgccccgttgaaatcgagaccgactatgcgatgttgcgcagccgaatgcgaacttacctccataaacgcatatgcgcagccggcatcgaccatttcacgaagtaaacgatgcaggtgtaaagggtcgggggtcgtatgagttgcaggaacagcgatgtcgtctatataattgcaaacggtagataaaagaccgaccttgtacccgaacagacggaacatttcatacagcaatgtcgccgtagtcgtcttcccgttcgtcccggtgacacccaccagtaccaactctttcgaaggatttccataccatgccgctgccaacaaaccgaatgcgaccgcactgtcttccactttcacatacaacacttgcggctccgacttttcgggaaactcttcgcaaacaacgacaacagccccctgtgcaatagcttggccgataaaatcatgaccgtcgaccgaagctccccgcaccgcaacaaataagttatctttctttacctgacgagaatccgattccactcccgagacttctgtcacgaccgcccctttgcgttccaccaccttaattcccgacaataaacattccacatttttcatatcatcgatatccttctatttcaattttaaaattaccgtcgtaccgggttgtatgacttttcccgaagggatagactgctctaccacctttccccgaccttgtatatttacattcaatccttcacgctccaatatatacaatgcatctcgcgcacccataccgcagacatcgggcatactgtcgcaatagacctccatatcgcgacattgggtcacatctccccgaactcccaaatgctgcaatacttgccttgtctctgcaatatccccctttaaaatagccggactccgaacgctcgtcgaatccgaaggtatatccataggcacatcgaggcgacccatggaataaagcgtctccgctatcttcttcaaaacgccgccacaatagtaaccggccgaaggcatacccggcaaattgggctttcctaaaagaacgatacacgagtactgcggattttcatacgggaaaaaaccgcaaaaagtgattcgataacgagtctcgtatttcccgtcggaacctatcgttctcaccgttcctgtcttcccggctatggtcacttttttcgaacgagcccgacgaccggtcccgtcatcgtcatttacgaccgcatataacatatttctcaatgctcttgccgtttcgggtttacatgcctgttttcggatataactaatatcgaagaccgtatcggttaccccgtcccgaatcaactcttttaccaatcggggcttcacgaattgcccgtcgttagcgatggtattatacaatgccaacgtataaatgggaggtatttttgtcgtatatccatacgacatacgagtcaggttaatacgatcttgcaccgtcgatttcaaatgtcgtatcgtaggacgggccgcccccggtatgcaaagatcgaacggttccataaaacccgacttataaatgcgctgtacaaattcatcgggattacgttcatatcctcgcagtataatttccgacagacctatattggaagaatatttcatcgcttcggtagcggtcatcgaagccctaccgtgcgtatcggttatgggtcggactttcattcccgccggataacggaaaactccatcatgcccgtttacgacatcatggggacggataactccgtcgtcgagtgctaccatcatcgacaaaggtttaaccaccgaacccggttcataaccttgcacggcattattcacagtttctacatattcccctccgggcaatctcgacaaattcgacatggcctttatatcacccgtcgccacctccatcactatggcaacggcaaactccggctgtgtctcttcgatggtctgcaataaagcctgctccgttatatcctgtatatccacatcgatagtcgtcttcacatcgagtccccgccgaggaggttcggccacccaatcgaccatacccgacggaatctgttttttcacggttttacccggaataccatataacaaagaatccaatgctttttccaatccgctgtttccgtgaaaagtctcgtccagccctccgatggcacgcgaagccatcgttccgtaaggcttctctcgtttgactattttctcccgctcggggtctatatgaaatcccgaatactgagtcgaatgccgtaaaaagggaaacgtcttcaacagttcgtaatcccttcccgtaatttcccgaaccaatacgaaataacgtttttttcttaaaaaagcagttcgcatagccttttcataagcggcaggagtcctttcggggaaatattttcccaatagtttacacaacgttttcagactgtcattgaactctctggacttgaatttgggaacgccgaaatcgattaacgcacgataataagtcatgttcgtagccatcacttcgccgttttgagccaaaatatcgccccgctcaggcattacctcatgagtgacagaaagcatacgtgcggctttctcgttccatttatcagcatgtataatacatgtatcggccgcttttttcacaatagcgacactgaacacgagcaccccgacaatcaccagagcataccgcaacaatatgtgatttctattccttgtctccatcttgcggtattaattttacgggaggagtatctggtatttcaagtcccaatttattttcattgacaagggcgataattctggaatgacgcaccagccccatatagcgggctgtggcacgcactcgctccgtcttggcattagacaattcaaaacgtaaatctttaatggtctcgacctttgtctgacaaacatatcggttagcgatcgacaaccaaacaaggaaaacgaccgaagcgataaatacccaatgagatctgaaaaaatccaaagagaatatacgcccctgtacaagcaatttcagatatttgataaatccgcctttctcgtttttcccttttttagccatatctataccttctctgcgattctcagtttagcgctccgcgacctcggattccgttctatttccgcttcatcgggaacaattactttattgttgaccggccgaagaggagcatttatccgaccgaaaaagtcctgttcggcacgcccctccacattacccgtcttcataaaattcttgaccatgcgatcttccaacgaatggtacgtaagaaccaccaatcggccgccctgcggaagtaactctaccgactgttccaacaaccggcgcagactttccatttcttggtttacctctatccgcaaagcctgaaacaactgagccaattcctttttttcctgcttccgattgatataaggccgcactacctccaacaatctctccgtcgtttctatgggagccgatgaccgagcggcaacaactgcggccgctatacgccgagcgctcttcaattcaccatacaaaaaaaacaaatcggccaatttttcctcgctacatgtagctatcaattgagccgccgtctgtcccgaacgtcgattcattcgcatatcgagaggcccttcgaaacgaaaggaaaatccccggtccgaatcatcgaaatggtgaaaagaaactcccaaatcggctaaaattccatcgactcgctccaccccgtaataacgcatgaagtttttcaaaaaccggaaattgctatggacaaacgtaaatcgaggatcatcgaggctattctgccgggcatcttcatcttggtccaaagaaaacaaacgtccacattcgcctaaatgtcctaaaatggcacgagaatgaccgcccccgccgaacgtaacatcgacataagttccacccggctggatattcaatccgtcgatacattcttcaagcagtgcgggcacatgatatacagccgattgcaactccatttatctatcgttcttcaactttgttttttcgcagggtaaagatagaaattaatccctaatccaaaggtgctctttttgactttttttctgtatttctttaaatcgacatggctctcgcaatcatcagaaacaactctgcgattcgactctcaaacaaaaacatctcgcaaactcacaaaaacaaaaaaaaatacagtaattttgtatgcactttttacaaatgatatgagttctgagcctttaaaaatcgacatagaaaaagtcgtcaaggagaaagctccgaaatatgcaaaaaaaattccgggatttctttttcgctaccttgaacgcacaatccaccaagacgaaataaactatattctcaaaacatataaagacagtaccggtgtaaaattcgccgacgatttgctttcttatatgaacgtgcatatcaatgtgatagggaaagaaaatatcccgcccgaaggtcgtttcatttttgcatcgaatcacccgttgggagcccttgacggagtcgcgctcattcgtttcttcggacatttttacagcggaaaaattaaatttctcgtcaacgatcttctcatgcatatcaaacctttggcgcccgtgtttctaccgatcaacaaatacggttcccaagccaaagaatccagtctgcaaatcaataatgcttatgaatcggacgagcagatgctcattttcccggcaggcttgtgctctcggctgcaacacgggaaaataaaagatttggagtggaaaaaaacatttatcgccaaggccgttcaatctcaacgagacatcattcccatctacttcgaaggacgaaattccacttttttttatcgatttgcgcaaatacgtaaatgtatcggattaaaatttaatatagaattgatatatttgcccgacgaaatgtttaacagcaaaaacaagacattcgacatatacattggcaaacctatcccgtggcaaactttcgataaatcgaaaagtttgcaagaatgggcccaaatcgttaaagaaaaagtctaccagataaaaaagaatcaatagcatggaacccattattgcgcccgttgataaagaacttatcaaagcagaactaaccccggacagatttatgcgggatactcgcaagggcggaaataaaatatatatcatcgattgcaataatgctcccaatgttatgagagaaatcgggaggttgcgcgaaatagcattccgttaccccggaggcggcactggattaccgctcgacatagacgaattcgatactatggacccgccttgccaacaactcatcgtatggaatcccgatgccgaagaaatcataggaggataccgtttcatcgtaggagaaaatattcgtaacgacgaaatggggcgaccccgtatcgcaacatctcatttgtttgaattttctcagaagttcttacaggattatctgccccatacaatcgagttaggccgttctttcgttacgctcgaataccaatcttcgagagccggtgcgaaaggattattcgctctcgataacctttgggacggattaggagcgctgaccgtagattatcctcaaatagaatactttttcgggaaagtaaccatgtaccccacttactctcaagagggacgaaacatgatactctattttttgaacaaacattttcccgaccccgatcgtctcgtttggcctaaacacccgttacaaaccgacaccgacgaagaaaaaatgagcaaattgttcatttatgacgactttaaagaagactacaaaattctaaatcaagaagtacgcaaactcgggtataacattccgccgttagtcaacgcctatatgggattatctcccacgatgaaaatgtttggtacagccattaacgacgaattcggaaacgttgaagagtccggtatcctcatcgcgataaaagatattatcgcagaaaagagaagccgatatatcgaaacctacgataaacttccgccgataaaaatatcatagatgatattatacttaatcggtgaataaacatattcgccatgaaatatttccatttcatacctgctgcatgcattttcttgttttgtcaatgcggaggacaagattctcatttcctgtccgataccaaatacatacctgtgtttagcgaagattcctgtcaatacatagaccacggagacaatttgcattttaccggagcatattccgatgcctccctgttttacgacaatatggcgctaatatgcaatcaatcggataaaaaatggggatatatcgacgattccggtgaacttcaatatccggcggtatatacccgggcaactatcttcaacgaaaaccgggcttgggtagtacgacccgacgaagccccttgcgccatagatacgaaagggagactgcaactaactctcacccgtgcttcgaaggtcatgattttttgtgaaggaatggcagctttcgcccaaaaagagaaaaaaggagaacgatggggatttatcgacaaatcgggaacacccgttattaaaccgctctataaagatgtaaaaccgctctcatcgggtcttgccgcagttaaaaacgagcaaaatctatgggggtatatcgattccaaagggattgaacgaataccggcgcaattctcgtcggccgagtctttctcaaaagaagggcatgcggttgtccggtccgccaaatcgggactgtttcaagtcatcgataccaaaggcgatactctgtggacgatcgaatgcgatgctctcatctccgacgggaatacctttcggataaagaaagataaaaaatgggggtggtgcgacaacaaaggaaacatatttatcgaaccacgattcgaagacagtgaatcttttggaaacacagacttggcccctgtcaaaatacgagggaaatggggttatataaaccgtaaaggcgaatggaaaataaaacggcaattttccaaagcatttccgtttttcgatggcttggccgtggtacaaaccggcacagtatacgggttaatagacccggacggacatttccaaatcaaccctcaatacgaccgtatttccgaagactacatttatcaatcgatcgggaaaggctcggcattcacactggtagaaagcgatcacgcccgatacaaataaaaccttcgcaacttattttccctccaacgaacggacagataactctcccagagaaagtttcttgatttcgggggtccctcgataatacacttcaccgtttccggtagcctttgccgtcaatttctgggtagcatgacacccgattactcctaccccccggattcgacaggttacatcgcgagcggttaatctatcggcttctatctgccctgccccggtcacagaaagctcagcttctcggcatttacccgtcagcgaaatttttcctttgccggtcaatacagatgctttcacaatgccataatcgatttgcggagccgaaatagaaccgtttcccagtactttggcctgaaacgccgctcccgatataggcgaaacaatctgtatcgatcccaatccgttattttcaacatactccaaagccgtggaataaacgataatagcaccctgcatctgctctttatccgacgagcctttatacttaatcgtcaactgaccttttttcgatacacattcgacatgagaaatatcctcggtcgatgccattatcacgataacaccggccgaatcggcactctgacgataagacacatcgaaattgttatataccttcatcttataaaaatcatctaccgaaagctgtttcacagaagtttctactgcctgcaatgcggtaagagacatcgataaaaccgccaatatactccatacctttttcatatctctcttttttatatttgttctggtaaaatatcacattctatcttatcgagaatagcagtcaattcatcgaccgtattcgcttgtaacatggctatgcgagtatccctgaaattcggaatgcctttaaacaacggcgtcgccgccaaatgtctgcgaatatgcaatatgccccggcgttcgtccaaccgagccacactttcacgcaactgcctcctcaaaaccgacatcttctcgtgaatcgaaagaggaggtaaaagctcgcccgtctccaaataatatttcatctccttgaaaatccacggacaaccgaaactcgcccgacccaccataacggcatcgaccccgtaacgatcgaatcgctctttggcaatttggagagtcgtcacatctccgtttccgataatggggatacgcatgcgaggattgttttttacctctccgatcaaagtccaatcggcttcgcccgtatacatttggctgcgcgtacgtccatgtatggtcaaagcagcaatgccgcaatcctgtaaccgctcggccaaatcgacgataatcttcgaatcatggtcccaacccaacctcgtttttaccgtcaccggtattttcacggcatcgaccacggctcgggtaattttcaacatcaacgggatatccctcaacataccggctccggcgcctttgccggctaccttttttaccggacagccgaagtttatatccaatacgtcgggattagcctcctcgcaacgacgagccgcatcgaccatcgcatcgacaaaacgtccgtaaatctgtatggcgacaggtctctccgcatcctgtatgctcaattttcgcatggtactgttgatattccttaccaaagcatcgctcgacacgaactccgtgtagaccatatcggctccgaattccttacacatcaaacggaaagactcgtccgtgacatcttccatcggagccaataacaaaggatacttgccaaaatcgagattacctattttcattcaaaatataatatttgaaaatacgaatatacaaaaactccacacttcatctgcccgaaattgtaaaaattaaccacgccttactcataaattaacatagacaaacgatcctccgacaacaactcgttagcgacttccaaaatatcatcggccgtaatccgctccatcaaagacgcaatctcctccaaagaatcgaaacgaccgtaacggaggaaactctttcccaaagccaacgccacattctccgaatgatcggtagaaacctctatctgccccataaactgacgtttggccgcagccaactttgccggcgaaagcctttgctctctaacccttttcaactccctcttcaccaaatcgatacatcgctgagtataacgatgatccgtcccgaaataaactgtaaaaagtcccgtatcggtatacgaagttacagacgattccaccgtatagacataccctctcttttcccggaggctcacattcaacacgctgttcatgcccgggccacccaataaattattcaacaacagcaacggacggcgacgtttgtcgaacaaatcatacgccctcgcccctataatgacgtgcgactgatgagtatcacggctcaccgtccgggaaaaagattcgacaaacggttgcaactcacgagacaactctttcttaggacggcataaatgaccgaaatagcgctccgccagccccctcacccgattgaaagatgtcgaacccataaaaaagaataccatattttcgggcgtataataatccgtcaggaaacgacgggcgacgtccgatgtgattcgagtcaaagaatccacgtctcccaaaatattccggcccaaagaacacccctcgaaaagagatgactcgaactcgtcgtaaatcaactccgaaggcgtatcccgataagagtttatctcgtcgacgacgacctcacgctccttgcacaactctctctccgggaactgagaatctgcgacaaggtcgccgagtaactgcatggcacgagccagatgagcgccggggaaaacagaatacaccaccgtctcctctttcgacgtataagcattcaactcaccgccgacaacctccatgcggttcaaaatatgcgaagcacgccgatgagtcgtccccttaaaaatcgtatgttccacaaaatgagccaatccgctgtaaccctcgtcctcgtcgcgagtcccggcattgacagtaaatccgcaatacgaaaccgccgattgcgtcggtcggtaaatcagacggagaccgttcggtaaagtatgtgtttgaaattcttccataaaatatccctgtattaaagaggtgcaaagatagcgcaagtcaagagtaagaacaagttcacttgattataccgagacgcagcctattttcgcagcatgcaaaaatagtgcaagtcgagaagagaaacaagtttattgagttataccgaattttcattacctttgaaagaaaaacagaaacacatgcaaaacattaccattttctgttctgcatcagacacggtcgctccgatatataaaaacgaagccgaaacagtaggacaatggataggaacacaccacaagacattagtatacggaggggccaacggaggcctcatggaaatcgtcgctaaggaagtccgcgacaatggaagccaagtactcggcatcatcacccggcatatcgccgaaatgggtcgatccagtcaacaacccaccgacctcgtcacaaccgacagcatgggtgaacgtaaacggctgctcatcgagcgaggcgacatactcgtggcccttcccggcggaatagggactatcgacgaacttttcgacgccctcacgacaaaaatgctcggcacacacgacaaacccgttatcatctgtaacacacaaggtctgttcaacccattgattcagcaaatagaactgctgcgcaaagaaaatttcttgcgatacgaccgtccggatctttaccacatcgtaccggatgccaaaacctgttgcgaacttctcgaacgatataaccgttaatacccaaaaacgaagatatgaaaaaaagcaacctatacacaatgaccggagataaaggcacgacatcgttagtaggaggacaacgtaccaccaaaaacgatccgaggctcgaagcctatggaaccgtcgatgaactcaatgcccacataggtctccttcgacaaacaggaaatcggtccgaagacgatgccctgctcctcttcattcaaaataaactctttgtcatcggctcctatctcgccaccgacacgtccttcacacaactccgagaagccagccgcctttgtcccgaagacatcgctcggatagaagaccgtatcgatacattggatgcgaccgttcctccgctccatgcattcctcctacccggcggaaccgccgctgccgcccaagcacacatctgtcgaaccgtttgccgtcgagccgaacgccgcatctgccaagtagctcaagaagttttagtcgatgaaaacatcatgaaattcatcaatcgtctgtcagactacttttttgttttagcaagatttaacaattacactgcaaaacaagacgaaattttctgggataaagattgtaaatgaaaataaataaattacttttgcgaaaattttataggaggacttaacgttaaatttttatcactatgtactggacattagaattagcatcgaaactcgaagacgcaccttggcctgcgacaaaagaggaattgattgactacgctatgcgttccggggcgcctctcgaagttattgaaaacttgcaagagatggaagacgagggggaaacctacgaatgcatcgaagatatttggcccgattaccccagcaaagaagacttcttcttcaacgaggaggagtattaacgttcctcggatagattaaacaattaaataccagcgcgacaaacaaatttttattgtttatcgcgctggtggttttatatctatattcaaagtagaatccttttattcctatgctaacatttcgttcatgatgttttgtagtactatgtcagcaactttatatgataggctggatttgccaactttttgagggtcatattgaacctgcttcaccatatcgatataaaatgcaaagttattaatcactttctcatcttcaaaatttattgttagaggatttattctccatttcaacttgccgttctcgaataccattaatgaggtgagtgcacaaatgatcggatagaaaaatccatacgcatagttatatatagatcgttttggataggtattaaatggaccagtaaatttgctgatataaccgcctgtttcattttccttctgcactactcctgtgatacggccaaaagagccagaattcctattatagaccattggaaagtggtaataaattttgtcgaaaaatctgacaatatcatcaacaagttcaaatccagatctgatcgcattgtctgtaagatcgtatttcccgagttgctgttcggaaacggatttatctttcattaagttacggtaatatttaacacacaagctcttttgtgaatatatagctattcggttaagtactccaatgttggggttgccatcaaaataaccacattcatgcaattttattaagggtaggcaggccaacgcaacgatatcgtcacattttatcgtacctggttcaccacttcgccatgcaatattttcacggtaactcccctttaagcatctcttaagatcttcatacagaccctccttattgctctttgtcgcttcattcagcgagacattggcgtttcttgccgaacaaatttcaagtatatgattagagaaatactcaattgatgcttcatctttatctacaggagctataacttcaattggaatagaaaatttcagttgcccaatgtgggattcatatccaactttcagcgaggcaaaagtatcctcattgcgataatatctaatacaatcgtcccaagttttcaagttatcgtcattaataacatttgcaatgaatcgacataacgcaaatgcgttgtgtccaccgtccattattccctccatttcttcttcagaaaaactaaggcgcactctattgcggtctaaaagatcgacatagatggacgaaagtagaataccttttgaactaaagaaatagagctccggggagaattgcaatgtttcctcaattgctttgacaataggattaatctttgcttttctagggttgaccttgctatctgcatgatgcattagattgatgaagccgagcggtgaaattggcatgacaatcttttggatgcagatgccttcgatagatcttgtaactgatacctgagtttgattctctgatttgagaattactgatttaacgttcataattttctttgaccattcctttcgaaattaataataaaatagggtagtatgccaactacttattcacttgcaagtaggaatgatcaagtcgccaagaaactttcgtttgcatgataccttgcgctaatccagcgcgatctctcatccaagagatactcccatccgggaacaggcacaaagatatagatttcatttgagttttccaaacgaaggcacattacggaaagaaattcatattgatatatatggcaataaacaccacaattattatttcggcaacaaatagcctttcctttataagaacatcgtcattggggtcactttgcacctctccaacttacgctttgggtagccaaactgaaatcagttaccgagctatatatgcaattagaaacagcagaattatattttattacatcgctcgaagattttgctgccccgttaatgcagactttaaataaggtatttttaaaaccctccctgctatcctctttaccatctaaaaacacgactgtaataatttgacaattactgtcttgaataactatcgtggaaattcaacaaaaaataccagcagaatcatttctctttttcaaagaacccacacattaaataagcacatattaagttaaaatcttaatccattttacccatttatcccacaaattttcctaactttgccttattgaatagtatctgcatttatagagatttatcacaccgctataaagtatctgtttttataatcacatgaacattatcatcacccctcgacaagaggcaaaaccatgaaaaaaataaagtgcttatgaaatcctaccgtacaatgtgtaagaaaacttgggctgttatacttgcgatagcctgccatctacccgctacatgggcaacaaacgctaacgaaatcgaaatcattccgaaacccgttcacgtagaacagacatcgggcaatttccggctttcccccaaatccacgatcggttacgatgccgctcttcaaggacaagccgaatacttacagcaagtgctcggtcaatccaccggctgggatttgaaactgaaaaaagatgcccgcaaagccactatcctcttgacattaaaccccgaaaaagtagataaaccggaaggctaccgactggacgtaacgcccaaaggaatctcactgaccggccgggacgcaggcggcatattctacggcatacaaacgctgctgcaactctttccgccccaagtgtacagcgacaaacggcagcatggagtggaatggatcgcccccgccgtaacgatatacgatgctcccaatcgcccgtggcgaggcatgatgctggacgtggctcgttatttctacgacaaagagttcgtgaaaaaatacatcgacatgatggccatgtacaagttaaacaaactgcaattccacttgattgatgactccggctggcgattggaaatcaaaaaatatccccgtctgaccgaggtgggtgcatgggcaggtcccgatcacaaccgtttgggaggattctacacccaagaagacataaaagaactgatcgcttacggacaagtccgtaacgtggaaatcattcccgaaatcgaatttccggctcacattctgtctgccgtcgttgcctatccgtggctcagttgcacgggcctgcaacacgaagtccccacacaacatttcatcagccgcgatctgctttgtgtcggcaaagaatcttccctgcaatttttacgagatgtattagacgaaaccgttcgattattcccttcctcatacatcaatatagggggtgatgaagccgtttacactcgttgggaagaatgtcccgactgccaaaaagtgatgaagcgggaaggattgaaaaaggcttccgaactgcaaggttaccttaccaacgtcgtagccgaaatgatgaaagaaaaaaatcgtaccgttgtagggtgggaagaaatctttttgcgaggtgatgtcaaaacccctgttgtcgggcttatttggcacaatgtcagggacacccttcttgctacgcagcgcggacataaagctattctgacacccgccacgcacatgtatttcgacttccccgaaagccgtaccccgggagaagtgaaagccgccacttggatgccgcctatctctctcgaaaaatgttacagcatggaaatcaacgactactctcccgaatcgaccgtattaggagtacaaggctgcttttggagcgaccaatttattcacggcactgtattgcaagagatagattatctgaatgaaaatcgctccgaaaactatgccgaatacttcactttcccccgtctgttagctctttcagaagtggcatggtgtcgacaatccgaccgcaattattccgacttccgttgccggttgagtcaccatttcaatcgactcgacttcaaaaattgccattaccgtgtaccggaacccatcatagaacagatgaatccgactgctaccggtgcaatagaatttacattatctccggccgtcgccgatgccgacattcgctataccaccgacggctcctatcctacggttcattcccccctttacaccactccggtaaccgtcaatgacaaaagcgacttccgggctatcaccgtagtaaatccccgtcactattcgctgcccatttatttcgcccccgactattcgggctataaacagtacggtgaatatacagccgaatggaaacccttgaacgtacagccctatctaactccttggcgattcgaatgtacaggcaaaatatcaggcaatggcacatatacggtatcgttcatctacacaaaaggtgaaaccccgttccggttaggcacattgaaactttacaagcgagacgaactcctcgccgaagtcccgcaatcggttctgataaatgccaattcccccgtagcgacctaccgctttaccgtcgattccttcgaagccggtactccctttttcatagaagtagaagcctgcggagagaaaggaaacgatacctcgggattagtattcataaacaaagtcactcaataacccataaaaaaataagatacacaaaaggcagctaagctgccttttgtgttatataacattcgatcgaaatacagaccgattctccgaaaagactatctttgtaaaagaagatatcataaaataattttataccacgtaacacagaaattttatcatcatggcaaaagcgcatatttttatcagttatgcccacgaagacaaagagtgggtactggaaggtccgggaaacattcatctgatacctcgaattagacgacacacgagtccggatgcagaaatatggttcgacgaaggattggttatcggcgaaaaatgggacgaagaaatacacaatcacatcgttcaatcacacattgccattttgctgattagcgaaagtttcgtatcctcggattatatcgtaaacaaagaactcgtttggatcaaagagcaagtagaaaaaaacgatatgaaaatcgttcctctactcatcggaaacatcaccgaaaaatcgaaacgaataatcgactggatatatcaaaggcaaatacacccttccgagacacaaccgctttgcaactatctcaacgataaagcacaatgggaccacatgattacgagcatattgaacatcatcgatgccaaaatcgaccaagtgctcgaaactcttttgctgaacgaaagcacccggcaaaccgaaaattcgattaaaccgtctgtcatgcccgacagtaaaacagttactggatatatcgaaaaccgagacacgaaaattaccgataaaacgacggcggcacacccgacaggagtaaaccccgcactttatcaagaagccatcagactataccggaatcacaaatacaaagaagcatcggatatccttctgaaattagccgccgcaaacaaccccgaagctcaaaatctcctttgcgacattctttgcaacaaagtaaaagggtatcaactatggcccggaattttagaaacattcctaccctacgccgaagaaaatcttgccttcgctcaaaccatcgtaggaaaagtctactatcggggaaaactgaatgagcgcaattacgaaaaggctttcgactggttctccaaagcagccgaaagcgggaattcatatgcccaatacttgttaggtaacatgtatgaaaacgggacattcgtagaacaaaattacgatacagctctctcctattataaaaactcggcagcacaaaacaacatcatggccataggagaaatggcatacatgaaagataatggttacggtatgcccatgaataaggaagaagccgaaaaaatatacctccaactggccgaagaacgcgatgacgagtggtccatgatcaaactgtcctatatcgaaatggatagaggaaattccgaagaaagattgaaatggatacaaaaagcgcttgaaaaagagtatatcgacgcctacgtagatttaggcatcttctatcaatccgacgaaaaatacaaagacctcgaaaaagcgcagcaatcttattatcaagcggcacaattaggcaatcccgaaggaatgaacggattggcgatgatctattacgatatgccggacaataaaggagacgaacaagcgtttcgatggttctccaaatcggccgacttgggagacagtctcggactatattatctggctgttatgtatgaaaacggtttcggaacctattccaacaaacaaaaagcatgggatctatatctagcctcagccgatcaaaaattctcgccggcctatcgtaaaatagcgcaactcatcgaagagggcgaagcacctgcatcattcacaggccgagaattggaatactatataaaagccgccgaaagaaacgacatagacgctatacacgatgtcatacggttcttggagaatgatcccgaccggcagaaagaattgttctcttggtgtcaacgaggagcacagctcaataacgggaaatgtatttgtaaattaggaaaactctatttctacggcatggggacagaaatggacgaattcaaagcgatgaactgtttccgcaaagccgaaacgatggaaatccccgaagcctactatttcttggggctggcctactacgaagccaaaggtgtggttagcccgaacatacaaaaagccgaagaatattttagaaaagctgccgaagccggatattccgacgcgattaaagcaatcgccgagctttatatgcagtcgggacaagaaaacggatatgaaaaagccatcgaatatctgaaaacgattgcggagggagaacatgccgacatcgcttatgaaggactcatgcgaatcgccgtggaacaaatgaacgctcaggattacgacgacccgcagaacagcgaattatatcaaaaagctctccgattcgaaacatcagggaaagaagccggtatgaccgagtcgttaagtaaagcgttcctcgatcgaggaataaatttatacaatatcgaaaaatacgaatcggccatagcacccttgcttttagcagcacaaatgggagaatcggaagccgcgacgcatttgggagatctgtatttctacggacatggcgtcgataccgattacgaacaatcctattattggttcgccaaagcagcgcaaagcaacaacgcttatgcccaatattccattgcattcatgtatataaaaggacagttcgtagaaaaagacgacacgcaagtaatcaagtggatgaaattagcggcagagaacggctacaccgaagcgcaaaagaacatgggagaatactattattatggctctttcggttgtcgaagagatatgaaagaagccataaaatggtatgaaatgggagcaaaaagcaacgaaccgacatgtgtgttcactctgggattaatctatgaagaaggagacggagtacaaaaaaatatcctgaaagctgccgattggtatcaaaaaggagcacaagccggcattccttcttgtttgtataatcttgggaagctaattatcaataaagaaatatcgggagaagaagagaaaggattcaacctcatacaacaagccgcggaaagcgaatactcctttgcccaaaactacatgggacgtgcataccgtttcgggtggtatgtcaatgcaaacccggtcagagccaccaactggttcaccaaagcggcagaacaaaatatgccggacgcaatgtgcaacttaggcgacatgtactcctatgaagacggattgaccatcgactatgaaaaagcgttctattggtacgaaaaagccgccgaaacaaaacacagcagagctttgaccgaactgggagacatgtattatgcagggaaaggtgtccgacaagattaccagaaagcaatggaatattaccagaaagcgtgtgacgaaggttatccttatgcattctattcattaggctttatgtattggaaaggacagggaacgctccccgacaaagaaaaggctcaggaatatctcagtcaagccgctgctatgggaaatgaaagcgctttccaacttttgaaccgcatggatcacgaatcggaagaagaaaaagacatcgacccattcgcccgacaagcctatttagaagctcaacaagcccttgccgacaaagaaacagaaaaatatatcaaccttctatcccaatcggcgaatttaggatatgttcaagccctgaacgatttgggagacctctattttaatggagaattggcccctaaacatatgggcaaagcatatgaatattttttgaaagcctctcaaaacggatcgggatatggttcatacagttgcggattcatactcatgaaagggtctgccgatattccccgggacattgaaaaaggactttccatgttccgtttggcggttgatcagaattacaaagcggcaacccgggacttggctcgatattactattcgttggaaaccgaagaagacaatcgcaaagcgttggactactacctgcaatacattgaatacaatcccaaagacaccgatacattgctccatatcgggttgatttacgaatcggggttgggagttccgctcaatatcgacctcgcccgtagatattatgaaagagctgccgaacaagacgaaaccggcatggcatacaacttcttgggaggaacctacatgaatgacgaagaaaccgagaacaacgaacgaaaagccgtgcactatttccaaaaagctatcgaattgggcaacacgaatgcaatgttccgaatcagctactacctccacaacggtaaaggaggattacaggtcgacatacctcgggaaatcgaattgctcaccgaagcctccaaacgcgggaaccatcaagccacgtatcggctgggattattattcgaagataacgaaagtggaatggctcaaaatctcgaattatccgtcaaatacttccaattagccgccgacaacggtattctcgccgccatcaacaagatgggagaattatatcttttcggggaagtaataccggcaaacctgacgaaagccatatcttgcttcacggcagcctcggaacagggatatgggaaggcctcatattggttgggaaggcttcataccgatggtatcggacaactcgaaaaagacactcaaaaggcgatgaactattaccgtaaagctatcgaacaaggttatgaagaagcccgggagtggatggaacaactccaaaaaaatttggtggacgagaccataacagatattgaaataccccaagacaaatcagacgaagagctatacaaagaggctaaaaatgcattggaaaaagctcaattcaaaacggcttacgcctatttttcctatttaacgcaaagaaaccatgccgaatcgttcaacgaactaggagacatgtatttctacggcagaggaatggcaatcaaccaagccaaagctctggaactatataaaaaagccgcggccctcgatagtgtttatggtttctttaatgtcggattcttatattggaacggacccgaagaaatacaagatcccgaacaagcattacaatatttgaaaaaagcggcccaaatgggctatacctacgcactgagtttcatcggagatatctatcgaaccggaccggaagaacttatcgattatgccgaagcgaaacgatactatcaaaaaggagtcgacgttaacgaaatcaatgcaataaaaggtatggctcttttataccttttgggacaaggcgtaacacaaaacaatgctatgggagcattctatttgaagaaagcagccgataaaggcaacgcatgggccatgtatcacttaggacgtctgtattattacggcgagggtattccccgtaaccccaaattggcattggactatttacaaatggcttatgatgcgaactatccggatgcatgcagtctgttaggactactctatgaaagaggcgaaggcactgcaccaaatatagaattagccaacaagttatacatcagagggcatgaattaggagacgaccaatccatgtggtacttggcttgcaattatctcgatggaaacggtctgcccaaagactacaaaagagccgaaaaactctttatacaagccatcgaaagagggaacgaaccggctcgaatcgacttagccagaatgatattccacggattaggaacagtacaagacccgcaaaaagcatacgaaatcataaaaccctgtttagagcaaggatacggacgagcatatatgttaatgggagaagtttacgaaaacggattaggtgtggaaaaagattataaacaagccaaagaactgtatcgaaaagcgctcgacttaggatatagttttgcacaagaagcactcgaccgtttagacaagttctgctaaaaataaagctgttaaaaacaaaggagcacctccttccctttcgtactctatggtattgcgtgacatttcagtcctcctcccttgccgtgccccgtagcattgcggggtgttttgaaacacaaaatataggggaggtgtccataggacggaggggttaaaaagaccacagcagaggaaatggattagggcatcaccctctctccctgccgtgtcccgtaacattacggggtgtttccgcaaggaaatttattttgtccccttatttttcaatgacaagttgtactttctttgtccctaaacgagcctgtaaccactccttgaatcttttttgctccgacaaagaaaagactttggaatgacgcaccacagcaagagttgtcgtgtctctcgcctccgtatcgatacggctgaaaatcgttttcgaaatggcaatatcggtaacattagggaaaagaacctttatttcaggagcgacttccacccccacagaatcatattgttggtaatgcgatgccagattttccaaagaatctatcgttttctgctggcgagctatctgctcttgattatgcaaataaatatctttaaacatcacactgctcaaagtacttatatccgcttgattttgcccatacccttgacgaacctccaatatagcaccgcccaatccatactggggcaatctcgcctgtgccacagctatggaatctttcgggatttcggctcctaccaaagagacgcgtatgatgtgctttccgtgctccgtcacagcacttttacttaaaacctgagtatcggcataattgaaattctgggaaacaaagcgggatgctgcgacctcgaaaaagttctctttcaccatattgtaagtaaggtaaatactcggagccatagtcagtatcaaaatggtatacaccattcgttccaccttcttgcgtcgttcatcgtccacaaactccttcttcgaatatttcattaacttcacgcccaaagtcgttgcgaacgcaataaaaaccgaattgatgaaaaacaaataaaacgctccgaaaaaataatagaaattaccggtagccaacccgaatcccgccgtacacaacggcggcatcaacgccgtggcaatggcgacaccgggtaaaacatttcctttttgtttggacgacatcgccacgatacccgccaatcctccgaaaaaagcgatcaacacatcgtagatagtcggcgaagtacgagcgagtaattcacttcgggcctcattcaggggtgaaacccaaaagtaaatagtcgacgttatcacactgaacaacgttgcgactgccaaattccgaaaagaacgttttatcaactcatagtcattgatacctaaccccaatccgatacccatgatgggacccatcagaggtgaaatcaacatagcgccgataatcacagcggccgaattggtattcaatcccaacgaagcgataaatatcgcgaataccaaaataagaatcgtagaacccttaaactccactcctgcgcgaatcgcttctaccgaagccgcctcttcttccctgtcttgactcatatcaagataatgagtcaaaaaccttttaacggaatcaacgaatttgggaaatgacataattacttttattaaaataccggaaactcagaaccgctctttcaaaacttggacacgaaacgtctcaacccgggaacctcgttcatcggcaaatcatgacggaacaaatagaccaagaacacacccaaaagcagagtcctgaatgccaaacgcaaaaagagggattcgatagggacaaccatcgccaccgcatacagcacaaccgtcaacagcgtatagcggaaagctgacttcaaatcataacgtatcgggtaaacacgttgcccgataaaaaaagaggccaacatcatactcgcataacaaacgaacgccccccaagcacaagccatatatccgaaacggggaacccccacgatgttgataatcgccgtaatggcaaaaccgaacaaagagaaccaagcgccccattgtgtccggtcggtcaatttataccacaaagaaagattgaaaaacacaccgaagaacaattcggcgagcatgacgataggaacgactttcaatcctgtacaatacgtcgccggcataaagaaccgcacgaggtctatataaaacatcactgcgaggaagatgaaaagcccgaatatgatgaaatacttcatcgcatccgaatacgactttttatttccgtcgccggcatctttatttcgggcaaaaataaatggttcgtatgcaaaacgaaaagcctgtgtaaacatcaccatcacgatcgctattttataaaccgcaccgtatacgccgagttccgacatggcatccgggcgattgcttgccagttgaggataaaacatcttgtcgaaggtttggttcataataccggcgatccccaaaattaataatggaaaagaatatttcaacatgcgtgacaacaaatgccggtcgaaccgataacgtatcccgaaaatctctgggaacaaaaccaacaatacaactcccgaactgatgacattcgagaccaatatatatcccaccagaaaatcggggtcgaaaaaccaagaaatccactcggggtgaataccatacagccacgggcaaagcaaaatgaaaaacaaattcaacgctatgttcaggaatatcgaaaacaatttgatcgaagcgaaccgtattggacgacgccgataacgcaagtaagcgaacggcaacgccgtaaaagcatcgacggctataatggccgccatcatcaatacataatcctcatgttcgggataacccaacaacctcgacagaggtgttataaacacccacacaagaacaaaaaacaacgtcgatgtagtcgccagcgaaataagcccggtagtatagaccctctgcggctctttctcctccttatcgttggcaaaccgaaaaaaaccggtctccatgccataagtcaggataatcaacaaaagagccatatacgcatacagattggtcacgatgccatactcggcggtcgttttcaatacgttgatataaagaaaaacgaaacaccaattcaagaaccgccccaatatactgcttaaaccgtatatggcggtatctttcgccaaactcttcatgccggccatacgtctctgcttatacgtgattaaaacaatgtaccctgctccgaaatccgtcgccgattcaaatgggtataagccaaatcggtcacctcgcgcccccggggcgtacgcttgataaatccctccttaatcaaatacggttcatatacctcctccaacgttccgggatcctcgcccaaagccgtcgcaatagtcgtcaaccctacggggccgcctttgaatttatcgataatgaccgaaagtatcttattgtcgatctcgtcgagcccgtatttatcgatgttcaacgcttccaaagaataccttgctatttccaaatcgatactccccgaccctttcacttgggcaaaatcacgaacacgacgcaacaaggcattcccgatacgaggcgttccacgactgcgcatagcgatctcggtagccgcctcatgcgtacaaggcacgcacaacagcttggccgaccgctctataatatgagtcaatacggcatgatcgtaatattccaaatgacagtttatcccgaatcgggcacgcaatggactcgtcaataacccgcttcgggtagtcgcacccaccagcgtaaaaggattcaattctatctgtatggaacgcgcgctcggccctttgtcgatcataatatcgatacgaaaatcttccatcgccgagtaaagatattcctccactaccggactcagacgatgaatctcatcgataaacaacacatcgttttcctccaacgacgtcaacaatccagctaaatcaccgggcttgtcgagtaccggccccgacgttattttgaaacccacccccaactcgttagccacgatattggcgagtgtggtcttccccaatccgggagggccatgcaacaatacatgatcgagcggctcttggcgcatccgcgccgccatgacgaaaacccgtaggttctctataattttctcctgtccgttaaaatcgtcgaatgccaacggacgcagagctttctcgaactcacgctcggtatccgaaattttttgctctcttatgtcgaatcgattattttccacaggctcttgcgttcaccgtatttcgacgacaaacttaacaatttattttgtgattacgagaagccgattggagttttttagggctatgcacgagagcagagctctaaatattcctatttatttcagggaatgggaactttcacgtcggcgtttcaatgtctcttttcgctctatcttgacccaaaattccctatgcgctcgcaaagcctcctctatggaagtaacctcgtcccaccctcgtaaacgagcatacacccctacgacatatcgtacgaccgactcgtcccgacaaaatcggttgaaattggctaagcacattttcggagtcatcggtataaaccgcatacggttcaggtcgataatagaaaacacgataccctcctcctgcttgtcgaacaagatatttccggcagaatagtccaaatgtaagaccccttttttatgcaaatctaccgtaaaagcggcgaacgcttccagaatatcctcacgtccggcaataccaccctcctcgaattctcgcatcatacgaggataagaacaattttccgacacaaaaaaagaatgctgcaaaagtcccccgctttttagttcgatataagcgaccggggcaggggtttctattcccatagacctcaatttcaacgcatactcataagcacgggaagccttgctgggacggaaaaaagtataagcgattctattgataaacaacggcactttataattcttcaccacataccactgcccctcataagaaaacttgcgaagctcgtttctggctttataaatgcaatcacccaacgtaggaaatgaaatcggcagtttttgtacgaaatttcgcagctggcaatatgatggattcagaacaagtttcattttctggtcatcgggtcttgaataatatgatgataaaaatacgctttttcaacgatgtaagaaaaatgtattcaacctatttctcttttattagagtttctaaacttttcacgcgatcgacaatagtttccggggctatctccaagcaagcataatcctttcgataacaaggcttattgccgaatacagaacaaggacgacaatccagtggcaactcaaccacgccgctatccgactgtcgccaacctaagaaaccacaatacgggtgcgtggctccccaaaccgaaacgaccggaacctccaccaacgatgccaaatgcatattggccgaatccatcgaaatcatcacgtcgagacggctcatcaaagacagctcgaccgcaaagccataacgcttgtccgccaaagaaatcactcccggataacgctcacgccataaggacaaaatctcccgttcccgatcgcccgatccaaacaaaaaaatctttactcggctttcctccgataacttcgaaacgaccttttccatacagtcgagcgggtaaatcttacctttatgcttagcgaacggagccactcctatccaacgctctccggaagatttcgggggcgtcaactccgaatacaatccttcgtcacccacaccctcatcatacaaagagacgaagttaggaacaaaactaaaccctagcgaaacaaacacctcgccgtaccgttcgaaagaggaacggagcggacgcagcactttcgccctgcgagacgttaattcctgtttttctttccgtcctttatcgattacggcaacacgaatcccccataatttgaaaaaaaagcgcaacaccttcgttcgcaacacatcatgcaaatccgctacggcatcgatggacaaccgacgaacctcccgagccagatgataaagcccgacaaagcccttgtgccttcccttgacatcggcgacgacaacctgtaaatttctcggagcgtttatgaacaactgtgaagccactttttgagtaagcatcacgaatgtggtttcaggataagcccggcatacggaataaaccacgggaatagtcatcgcgacatcgcccaatgccgacaaacgtataatcagtactttgcgataaggcataaaaagtgtattactttttatataaaaccggattcaatgccggatcgttatacatcttcatctgcttgtaaaccttcatatatttcttgccagactctatttcatcgagcaactgggtgatcgccatagacaaatcggctcgttgctccaataaaattctcagcttttcccggcatttggcgacatgctcgggagaggcatccttacgctctacctcttgttgcatatgatagattttaacggcaagaatcgacagacggtctatggcccaagccggactttccgtattgatggttgcatccgcttttacctcgacgttggcatacttttgtaaaaaataatcatcgatcatttccaccaaatcggtacgctcctgattcgacttatcgattcttcgcttgatagctaaggcttcttcgggatctatctcgggattgcgaataatatcctccaaatgccactgaaccacatcgatccaatttttcagacacagataatattctatactcccttccgaataaggattttccaacggggcatcgacttggtcgaaccgatgataatattgtgttgtattccaaaaaatacgattacacgtttcagcgaaattcataacttattgctttaacgaatatgacttctttatcacaaaaacaatatcccgcacagaaaccagcgatttcacctccgccggacacggcctatttttgtttcatgcaacaaacataacaatagttttacgaacttccgctattttcctcatataaaaatagcttttcgcttctttaccctaaaaaattactatttttgtttatcaaaaaaacatagcgatgaacacgattccatatattgtagcagacaacaaaataccctacctgaaagggattctcgaaccttacgcacgaatcgattacctatcccccgaacggataaatgcacaaacggtacaagatgccgatatacttctaatccgcacccggacaaaatgtaatcgggaactgctcgaccgaagtcgctgccgatacatagcgacggcgaccataggctacgaccatatcgatacgctctactgtaaagaaaaaggtatctcttggcaaaacgcacccggttgtaatgcatcttctgtcgggcaatacgtattgtcatcattgctggcttggagcaaaagcaccagaaaaaacctgcaagactgcaccataggcatcgtaggagtaggtcacgtgggtaaaatagtcgcccgatacggcaaattattgggaatgcaggttctgcttaacgatcccccccgacaagaagccgaaagcgaaaccgattttgttcctttcgaaaaaatttgtcgggaagccgacatcgtcacatttcacactcctctgacacatgaaggaaaatacccgacatatcatttggccgacaccgactttttcaatgcccttgaaaaaacgcccctcattatcaatacggcgcgaggagaaataataaataccgaagcattgaaacgagcgttgaaacaaaaaaaaatatcgtcggttatccttgattgctgggaaaacgagccgaacatagataaagaattattggaacaagccttcattgccaccccccatatcgctggatattctgccgacggcaaatcggaagcgacacgcatgattgtacagtcggtcggaaaatggataaaaaccgatatccccacccaaaacatcgtaccacccgcaccggtacgagaaattatcgacctctccggggccgccaatcctctgcaacaagccgtatgggaatcctacaaccctttcgacgatgacctcagattgagaaaatctcccgaaacattcgagatgcaacgaggcctgtaccccctaaggcgagagtttccggcttattatataaaaggtattcccccgaccggttctcccattttagaaaatttaggatttcacatcgtataaatatacacattttatacttgtatagaaaagaaaaatgaataaataactcgataaaaaatgaccctttttaaacccttctcacatataaaaacacgtgttttttgcacataaaacctataaatgcgcaaaaaacaagtaatttataagagaaaattttttttgttcggagaaaaatatattcctttgcactgcaaaaaataagaacgttaatttatttattaattaaaatttaaaaattatgtctgacgtagcatcaacagtaaaagaaattatcgtagaaaaattaggtgttaaagaatcagaagtaacccccgaagcaaactttaccaacgacctcggtgcagattctttggacactgtcgaaatgatcatggaatttgaaaccaaattcgatatcaaaatcgctgatgatcaagcagaaaaaattacaactgtaggtgaagctatcgctcacatcgaaaaagctatcgcagagaaataatttatggagcttaaaagagtcgtagtaacaggtcttggtgcaatcactccgttgggaaacgatgttccctctacatgggctgcccttttagaaggagtaagcggagcagggcctattacgcttttcgatgcatctgaattcaaaactcaatttgcttgtcaggtcaaggacttcgatccgttgaaatacttcaacgcaaaagaagcccgcaagctcgatcgctatacccagtttgctctcgcagcgacccaagaaggtatcgcagattcgggattagacctcgaaaccgtcaataaagatcgtgccggtgttatcttctcggcaggtatcggcggaatcagcacgtttgagcaagaagtcgggaattatgccgtcgctcccgaaaaaggacctcggttcagcccgttctttatcccgaaaatgattgcagacatcgccgcaggacaaatatccatgatatacggtttccggggacccaacttcggtatcgtatcggcatgtgcatcttctacccacgccctcatcgacgcatataactatatacgtttgggcaaagccgatttcatcgtatcgggtggagccgaagctgcgatcaccgtatcgggtgtcggaggattcaatgccatgcacgcactctccacaagaaatgattcgccggaaacagcgtcacgtccgttcagcgcttcgcgcgacggattcgttatgggcgaaggaagtgcctgcctcattcttgaagaattggaacacgcattggcccggggagctaaaatctatgccgaaattgtaggaggcggactctctgccgatgcctaccacttgacggctactcaccccgaaggtttaggtgctaaattggtgatgcaaaacgctctcgacgatgctcacatggctcccgaagagatcgattacatcaacgttcacggtacatctacacccgtaggtgataaatcggaagccaaagcgattttggaagttttcggagatcacgcatacgacctcaacatcagttctacgaaatcgatgaccgggcacttgctcggtgcgactggtgcattagaggccctcatctgtgtgaaatctatcgatgacagtatcgtaccccccactatcaaccatgccgagggagacgatgatcccgaaatcgacagcaaattgaatttcacattcaataaagcgcagaaacgcgaagtaaatgcagcgctgtccaacacctttggtttcggtggccacaatgcaagtataatcgtaaaaaaattcacgaagtaaaaacgtgttcagaacgatttataaccgtataaggctccttatgttgcgacataaggagccttatgttctttatcgtaaactgttaggtttttatcctaccgacatacatctgtatgaacaagcctgtttgcatcgttcttcctcgatatgcgaacaaggccggcgcattaacaacgaacgactcgaatttttgggcgatgcaattctcgatgccatcgtcgccgatatattgttccacaagttcaagacgagcaaagaaggatttctcaccaacacgcgggcaaaaatagttaaacgcgaatcactcaacgaaatcgcagtgaaattaggtctcgataatttcatcacctattccatgcgcaccagttcgcacaacaactacatgttcggcaatgccttcgaagccctcatcggagccatttatttggataaaggataccgatactgcaaaaaattcgtcgagacccgtatcatcgacccatatatcgatctcgaaaaaatctcgaaagaagaattcaatttcaagtcccgactcatcgaatgggggcaaaaacacaaagtcgatatagaatttgcactgatcgagaccatcgtcgaccaagacaacaaccccgtattccaatcacaagccctgctcggaggtatatccggtgggataggaataggatactccaaaaaagaatcgcagcaaaatgcagcacgcatagcgctcaaccgaatccgcagagacaaaaactatcagcaatcggtattagccactcgggagaatgggaataacacgatcgtaacataaaaatcatagacaaaacaatgggaatcacgggagaaatatctatttttgccacttattgaaaacgttcgtcaaatgaatcctacaaagttgatacgttcgatatttgcaaaacgtctctctcaaatagaccgttatgccgattacggcgacatcatacagcaaaaaacactgctcgacctgcttcaaaaagcaaaaaacaccgaatttggaacaaaattcaaattcaacgacatatcctcctataaaagttttgccgaaaacattcccatcaatggatatgaagaattaaagccctacatcgaacgaacgatgagcggggaacaaaatatcttatggcccacaccgatacggcattttgcaaaatcatcgggaacgaccaacgataaaagcaaattcattcccgtcagtgccgaatccctcagatactgccattatcaaggaggcagcgattgtgtagccctatacctcagagaaaatcctccaagccgtttcttttcgggaaaaggcctgatactcggaggaagccgggcacaaaacccttttggcaaagcctattgcggagacctatcggcaatactcattcaaaatatcaatccgctcatcaacctgataagagtcccgtcgaaaaaaatagcgctcatgagcgaatgggacaccaagctcgaagccatcgccgagagcacgatcgatcgggacatcaccaatctgtcgggagtaccctcgtggtttctagtcctcatcaaacacatcttaaaaaaaacaggtcggcagaacctcacggaagtatggcccaacctcgaagtttttttccacggaggaatcagtttcgcaccctatcgcgaacaataccgggagctcatctccaaccccgacatgcactacgtcgagacctataacgcttccgaaggattcttcgccgtacaaaacgacctatcggttgccgggatgctactcctcatcgacttaggcatcttttatgaatttatcccgctgggaaaaagcaacgaacacgccgttccgctgtgggaggtagaagccgggcgcaactacgagatggtcatcacctctaacggaggcctatggagatatcgcatgggagacaccgtaaaaatactctccacgaatccgttaaagataagcatttcgggacgcaccaaacactatatcaatgccttcggagaagaactcatggtcgataacgcagaacaggcaatcgcccgcacctgcgcacagacaggagccagcgtactcaactacacagccgctcccgtatacatgaccgaccacagcaaaggacgccatcaatggctcatcgagttcggcgaactccccgttccggtcgaaatatttgcagaaaagctcgacacgaacctccaaaatttaaattccgactacgaagccaaacgatttaaaagtatcgcactcgaatgcctcgaaatcattcccgccaaaacagggatattcgatgcttggttacgtgaccacaacaaactcggcggacagcacaaaatcccccggctatacaatcgacgcgacatcatagaagaaatactccggtataaccggtaatccttaatatccggcttctcaattaaacagaaaaacagggctgcccgactgaattcacataagaggaaattccccgcctcccttgccgcgtcccgtagcattacggggtgtttccgtagggaaatataggggggggtgaaagacaaacacgatacatcgtaaggtattaacctcctcccctgtgttttgcaacgcaaatataggggaggtgtccgcaggacggaggggttaaaaatacccacagcaaaggaaacgaattaaggtgtcaccctctccccctgccgtgccccgtagcattacggggtgtttccgtaaggaaatatagggaagaaagacaaacacgatacatcgtaaggtattaacctcctcccctgtgttttgcaatacaaaatataggggaggtgtccgcaggacggaggggttaaaaaatacccacagcaaaggaaacgaattaaggtgtcaccctctccccctgccgtgccccgtagcattacggggcgtttccgtaaggaaatatagggaaatcggaggggttaaaaactagaaagaagaaacaatataagaatttggcacgacaacaacatctggttccaattctcaaaaatcactcctaaaataatccccgcgaatcatcaagtccgatattcgccacgactgcttcattctttctatcgcctcgggacaaataccggttgtatccccggcaatcgtcaaattccaaatagccgcgacacctagatgagacgggtctagaatactctgccccatacctttccagccataatcgtccagtccggtcaaatccaataatgtcgaataaatatctacttgccccataactttctcgtaccgcatgcccaccggcgaattaatcacgataaaaggagtatattcaaacggagagacaagtccaccaccctcttttgtttcacacaacgactgccgcaaataagccaatccctcatggtcgcccgtcacgacaatcatcgtctcgtcgaacaacccctcctcctgcaatcgttcgataaacttccctattgcataatctgtgtaattggcagccgtcaggtaattgttcagcacctcgggcattcccggagaaaaagaaatccgtttgtactcatcgggaataataaatggcccatgtcccgaataagtaaccaattgaaaaaaacaacgagaactatcaccgcttccggctatctcctcggctattttctcggcacactgttgcaaaaacggataatcgcccacccttttcttcactcccattcgctcttctttcgtgaaggacttctcatcatacaatcggtcgaatccgaaagccatagccacaccctgctggttccacacgattcgtttgtccgaggtcatacctaccatgcgacctttttccccacaggcctgtttcaaagccttcgccagcgaaggatacctatgattcgggaaacgaatactgtatgcaccgttcgctatcggtagcaaccccgtattcaccaacaactgtgcatcgatggagcgtccgccgcgaacttgcgtctgtacccggggagcatacaacgtacatgaatctttcaaccagcggttcaaataaggagtcacctcctttccctctacattccgttccagcatccacccctcgaacgactcggcgagaatcaccacgcaatgcttcctgtgttccaccccggaaaccggatacgatctcgatgtggccgagagccaccgttctatctcactgtgaatctccggcgtaatagacatgctctccttgacgaactcatagcacaaagtcccgaacaccgtgaacgtcggtgtggcacaagtattccgtttctcatacgatcgttggaatcctcctcgggcaaacgtcaatcccaccgtcgctacgacacaaatcaagaagcccgctgcaaaccatacggcccgacgtttcgtttccgaccgactcgaccgcaaatccccgtatcgggaagtataaaacaacaatcccaaagtcatcgcaaagaacaacccgtcgcaccatcgaaccgatgcatacacgctacccatgaaatcagccaaattacccgcaaggaaataactgttccacggtatcgccgtataatatgtccgccaatacatcaaattggcaaccaacaaaatatccaataaaaaacacacgataccggcataccacctcgatcgaaaaaacaccgtggggaaagcgagcaacaaggcgatagcacccttaatcagataagactccggctggctgaacgactgaaaagtcgtgtccgaactccatataacatcaaacaaaataaatttcaagaaaatacaaacggccagtgcgaccggcaaactccaccttttcataaatattctttacattttggtcgatacatcggcatccctttttgaatgggatgccgactaaaaatataaattcgcaatacatttcatctcctacggatacacataacccgcatttccttcatatacataatctccctttttatttccttgccacacgatcgttacataatgatcgcatcggcgcccattataatacatatacaagggaacggttcccggctcctgtttctcataaatatatgccgtgatgccttcgagcacatagtcgcccttcttctccccttggtaaaccggagtacaataatgatttacacactttttattataatacagatataatggtatcgttcccggttccgggcctaaatatacataaccgattacaccttggtattcccaaagaccatttgctaaaccttgccataccgaagtcgcataatgatccattttgttagcacgaaaatactcatacaacgggaacagctgtttgagtcgtttggactcgatataattcgctaccgcttctttaagtgcagctttcacagtcgggtctgccgccaattcataaatgggaattaatcggggcaattccacgtcgataagcccggcattatcggcattgaccgttctctgccagtccgcaacagagccaaatcgaggttgctcctttatagggtcgaaagtttccagcagcgcatctgtgccaccggtgacattgatcgtagcgagctgccgggaattattcaccgccaaactggtattgacttgatattcgttcccgatggaaaacaaattgagaacatcgaccttgaatcccgctttcgtaatcgcctcgacattctccttgccggcatacgtcttatacaagaaactcacgcgtccgcccatacgaatatcggccagcacatgagtgccgtaaaaatctacaatatcttcggcaggcagttcggcgagatcttctcggaacgtatcgctcagatagttttgtagccgctcgaccgccgcccttatataacatcttttcaaagaataataatggtcgcatccggcaaaagaatattccgacgaatacgatgtatttttttgataattaccggttattgtcaaactgaataaagcctttttcgcatcgactccggtgtccacattgtctcccacacgtttcaaatactcctcggcagtagtgccataataatattctgtctcttgcgatgtcgaagaatcgagaactatgcggtcgaaattttccgcctcgaaccggtctatatcaataacaggcagggtaacccctttcccatgactcatataattgccggtaacatcatatccccaccccaacacaccatatttaggatgagccgccacacgtgtgacaagaggcgcagtcccttctgtattaaactcttccggcaaagtttccagttcagaattacaggaaaaaagaagtgagcacactccgattgcgtaaataaaatttctcatagtttatgatattttggttaattaatactacaaagatataattacatcggatagaaatacaaatttttctataaatattttacaacccaataaaaaaaatacctgttaaagaaaaacaggtattttacttgcccacaaaaattatatttatttaaaactcgacctcttcaaatggaatattatttaatttcgccgctcttttggcaaaaccacttttgtacattttaccggttatcaacaaatatattttcttggcgtgagaaagaacgaaaaaatcgagaaaagtcttcatatgtacttgaatatcttgttgagaagtactatccatgtgaccgacttttcccggtaacaaatatacaaaatccaattttgatacttcttttaaaaaactgccactatcggcagtaacgagaatctttttcgaatcgggattagtttttcttaaaagttctatctgacaaatacagctatttatcagttctcgttgttcttctggcgaataaacaatcttaccatcaacagagtctccgagaaggttttgaaatcgaaaacttaatgcaataaaattctgacctaaaatctgtaaattttcatcaatccaagactgtaatataggggcaggcttaaacaacttattaaacaacaagccaaaacgatcgtcggcataatacatattggtatatatatgaatctgccgaaaatctcgacctaaatatttctctgccattttacgttgaaatcgacaatcagcctctggataacggctgttggaatcaatataaaccggagtagaaaatgttggattatacgaaatttcaccagctcctatcctccaatcgtattcattaggaagtaataaatcttctagattgaatgggcttgtaaaatgaatacgaaaatcgactctatgatttaagcaatattcatacgtcgaaacgattccccgtagcctatcggccaatcctccatgacttttccttccatcggccataaaaacaatcattttattcgtatttttcccgacaggaaacgcctccttgtaatatggcaataaatgtctgcgtactttacgacgaagacgatattctctataaaataaattattcaaattacatttgacaaaatcttttattctcatgcggttccaaaaattacatgtcctgacaaataaatcttaacaaaaactcattaagactgtaaaaatataaatagtttctcggaatccaacacaaaagcaacatttaataaaacacaataaatcaatctgaaaagaaaattttatggatttcaagaagatacaacagatattcacagcgcattcacagtaatgaatacagagttgagcttaaccctcctccctgccgtgtcccgtagcattgcggggtgtttccacaaagaaatatagtgaggagaaagacaaacacgatacatcgtaaggtattaacctcctccctgccgtgtcccgtagtattacggggtgttttgcatagcaaaatataggggaggtgtcacaagtgacggaggggttaaaaaatacccgcagcaaaggaaacagattaaggcattaccctctctccccgccatgtcccgtagcattgcggggtgtttccacaaggaaatataggggggagaaagacaaacacgatacatcgtaaggtattaacctcctccctgccgtgtcccgtagtattacggggtgttttgcatnnnnnnnnnnnnnnnnnggagaaagacaaacacgatacatcgtaaggtattaacctcctcctctgtgttttgcatagcaaaatataggggaggtgtccgcaagtgacggaggggttaaaaaatatccgcagtaaagaaaacggattaaggcattaccctctccccctgccctgtcccgtagcattgcggggtgttgccgtaagggaatataggaggagtgtccgcaggacgagggggttgaatatacgaaaaggaaatacaaagactttttcataaaataatattaaaatatttatctttgtctccaacacacataagaaatacaatggataacattttttatagcatacgcaacggcaagaatcccaaatacagctattatttgaaatcctattttctcaggctactacctttgaaagcgatttgtcgaaaaaggctgaataagattctcgcacaagtcgatacccgatccgataaaaattacataaacgaccgggtgaactattacaatcggctcattgaaccggtaaaactacccgaaggctctccccacctgaacgaactcaaattgcaaaagaaagggaaagtctattacttcgattcattcgaatacctccggtacttccccgaaaacctgcaatggaactactgtttcggcgatatcaatttcatgcccgataccccttccattgttaagagcaggcccattcacaatcaatcggcaaatgccatactattgaatttgaacaaagtgagacatttcatcttcgtcaaggacaaaataccgttcgaaaagaaaatggacaaagtcattttccgaggaaaagtcaacgaagggaaaaccaaacgcattgccttttttaataaatacttcggcaatcccctctacgacttgggcgacaccagtcgcaacggcaatcccgcttggcgtaccggtaagaaaaccatcgccgaacatctgcggtacaaatttatcctcgccctcgaagggaacgatgtcgccagcaacctcaaatgggtcatgtcctccaactccgtagccgtcatgccccgacccgaattcgaaacttggttcatggagggacgacttattcccaactaccactatatcgaaatcaaacccgatttctcggacctcgaagagcgtatcgcctactataccgcccaccccgacgaagccatcgaaatatcccgccacgccaacgaatacgtcagccaattcttcgacaagaaacgagaaaaactcatttcgcttctcgtcctgcaaaaatacttccgcaagaccggacagttggaacaatgaaagccatgattcacaaatgataatcggcactttttgtatctttacattcgatagtttataaacgacaattacccaaaaaatggaaatagaaaaattacaatccttatcagacgaaattttagacgaactgttgatcgtatgggaaaagtcggtacgcagttcccatcattttttaaaagaagaagatatagaatacttcaaacctttaataagaaaccaatatttcccggctgtcaaactgtttgtaatacgcaatgagaacgggcggattgccgcatttatgggattaagcgacgacatgctggaaatgttgttcgtactgcccgaagaacaaggacacggttacggcaaagcattcgtggattatgccatcgacaaatgcaatatctacaaagtagatgtaaacgaagataacgaacaggcttacaaattttatttgcacatgggttacgaggttataggacgagatgaattggatccttctggcaaaccgttccctatcctgcatttacaacaaccgtcaagtcattgaaaataaatcctccacagggctaaaattcatgattctgtggctttgaggaatcaaagtataccacaagcctttaaaaacctcacgcttaaaaatctacactcaataattgttgtttgcagaaacgaatcttttcaagccgaactaaaaaagccccgatacttcgttcggtatcggggccacaatttttatcaagattccaagttatttcacttccgaaccgggagcgatttcatcggtcgccggggagatgacaatcaaacgcccgtcggcatcctcggccgaaagaatcataccctgcgactcgatacccttcaatttgcgaggttcgagattagccacgaagcacacattcttacccaccaaatcttcgggagcataatgcttggcgatacccgatacgatcgtacgtccgcccaaaccatcgtcgatacggaattgcagcaacttgtcggctttgggcactttctgacattccagcactttacccacccgaatatccaatttcatgaaatcgtcgaaagcgatattctcccgtatcggcgcagccttgtgattcttcaattcattggctttcttcgtctccaacaacttgttcacctgcgcctcgatcacgctgtcttctatcttctcgaacagcaactcggccttacccaactcggctccggcaggcaaaatatcggtacgtcccagcatattccagtcacaatgtcccaaatgcaacattccccgcagcttctcggcagagaaaggtaggaatggttcgaaagcgatagccagattggccgtaatctgcaacgaaaggttcaatatcgtcgccaccctgtccatatcggttttcgccagcttccacggttcggtatcggcaagatacttgttcccgatacgagccagattcatcgcctccttcaaggcatcgcgaaaacggtaatggtcgaggtaattctccacctcggctttcacatcggcaaactccttcaatgtttcccggtcatagtcggtcaattcacccgcagccggtactttcccgtcgaaatatttatgagtcagcaccaaagctcgattcacgaaattgccgagaatagccaccaattcattattgttacgagcttggaaatctttccaagtgaaatcgttgtccttcgcctcgggagcgttggccgtgagcacataacgcagcacgtcctgtttgccggggaactcttcgagatactcgtgtaaccacaccgcccagtttctcgaagtggaaatcttgtcaccctccaaattcaagaactcgttggccggcacattatccggcaaaatataactcccctcggctttcagcatcgcagggaaaacaatgcagtggaatacgatgttgtccttgccgataaagtggaccatcttcgtatccttgtctttccaatacagttcccatttgtcgggaagcaactctttggtattcgagatatacccgataggagcatcgaaccacacatacaacaccttaccttcggcgccttccaccggtacgggaaccccccaatcgaggtcacggctcaccgcgcgaggttgtaaccccatgtcgagccacgatttgcattgtccatacacattcggtttccattccttatgctcttccaaaatccattggcgcaagaacggttcccacttgtcgagaggcagataccaatgctttgtctcccgcaaaacaggctgatttcccgtaatggccgatttgggattaatcaagtcggttgcattcaacgatgtgccgcaagcctcgcattggtcgccataggcatgttcgttgccacagtgcggacaagtcccggtaatataccggtctgcgaggaactggttagcctcctcgtcgtaatattgcatcgaggttttctcgataaattcgcctttatcgtacagcttccgaaagaaatcggaagccatttcactatgaatcttggaagtcgtgcgagagtaaatatcaaaagagattccgaactcctcgaacgactttttaataatattatgataacggtccacgatatcctgcggggtcactccttcggccttcgccttaatcgtgataggcacgccatgctcgtcgctaccgccgatcatgatcacatcttcgcctttcaaccgcagataccgggtataaatatctgccgggacatatactcccgccaagtgacctatatgcacagggccgttggcataaggcaaagcggtggtaaccaatgtacgtttgaaattcttctccatatatcgtattattttctatcgaatcacttggattaaagaggctctgcaccgatcgagaccggtctgccgtaacctctggaatacaactcatttttttgcagagtgcaaagatagtgcaagccgagagtagaaacaaatttacttggttataccgaggtgcaatctatattcgcatactgcaaagatacaaatttcccaccgaacgaaatacctcgaattatatttttacggtatagactcatgaaaccttcctacaagacaacttcttgggatagtttaaagacccattcattcaacccctccgccactacgtgccacctcccctatggctgcgccacaccccgcaatgctacggagcacggcaagggagaagtttaaatatgttcgaaatgcattttagccctctccccctgtgttgccgtaagggaatatagggggagtgtccgcaggacgagggggttaacccttacagtcaaaaattttatgctatctttttcacgccctctcctcaggaactaccgtttcttcggtctcttccctatattgtttacacaactccccgcaatgccactggacacggcaggggagaaggacaaatacgatccatctcattcgataaataatgagatagaagggcattaaatctcttttcctgtgttttgcacagcaaaatataggggaggtggcacacagtgacagacagaggggttaaatgtaggcaaagaggattacagattttaaacataccgtctactcccgtcccgaaaaacgagcgaaagcgaaccgcacggcaaaccacaaatgacgcaagaacgtcggtaaagtcccgtaatatcggcacataatctcgtatctctcctgcaacgaagcctttcggttggcggtagtgaccccctcattcaaataatcgataagcacctcgtgcgtatgagttatcgttctcgccatttgcatgcaccggatacaccagtcgaagtcggcggagaaactataccgcaaatcatattccggcgcaatctcccggcgaacgataaacgcctgatggcacaccagcatccccatgcgaaaactcttcaccgataacctttcgggagcctgtaacctccgcatggatataaaacgtctttccgaatcgaccaatgccgtctctccatagacaatatcggggtcgtttttttcgatggaatcggcgattttctgcaatgtatcaggctcgtgaaacgcatcgccggcattcagaaaaacgagataacaccctcgtgctttacgcaaacccttgttcatggcatcgtataaacccttgtcgggttcgctcgtcaccgacgagaccgctgccgagtgctgcgcaatcgcaaccgtaccgtcggtcgatgcaccgtccacgatcaaatactcatagtcggtaaacgtctgtcgttccacacttttcaacgtagccggcaaagtcccggcagcgttaaacgtaatcgtaataatcgaaaaaagcggccgtcccattacaatccgtttttcatgaacaatccgatatccgagaaactgtccgcctctttccgaagttcgtcgaacggacgttcccaccatcgcgaagccaacagataagcaatctgctcatcgtcgaaccgtttcctgatttcccgggcaggtacaccgcccacaatcgcataaggagccacatcgctcaccaccacggctccggtagcaatcaccgcccccgtaccgattcgaatccccgacatcaacgacacgttgttcccaatccacacatcggctcccacctctacgctcactcgtcgttcccgatcgagataccggcagtcctcataccgcttttcccggacaaacgaaaaccccggttgcccgttgggagagaaaaaagccgggtgagtagatacgaaggtgcgggtcggatgctgtccgttgacgatacggacattccgaccgatcgaacaaaacgcaccgacctctgcatcggtgaaattgctccctcggcaaatataagtgccccggccgatacgggcgccggccaacaaaacattgtcctgtatggtattatatccggccaatcgggtacgaccgtcgatataagccttgtacgaaaccctcgaatgacgagccagtcgataataaaactgcatgaaaaacataacgatacgactggctaaacgagtcaaatccctcataatctatctctttttacgattgaatacacgaatccacagattcccgatgaatactttcaatttatgcctgtacgaataattataacgataggttcgggaatagacttttcgggcgagcaagttctcttttaccggtgaaatgggaactaccgctatcggattcatcgacaaagtctgcgtgcaaagctgcatagtattgcaatgcgttccgcttccgtcgaatcccgcattatcgaccaacgaacggcccgtgcccaacatcagcttgtcacacagaaacagcgatgcataccaccgtatgaaccacgagttattccgaccctcgatttggtcgcgcaacatctgggtaaagtggaaacctccgtccaaatcgaattgcctacacaaatcccgtcgttcgatttcctgcaacgattttctaccgtttggctcgaaatattgccatgcacggctccaagttccccacccccaactgttacaccagcgtatcaaaaacgtatcgggcaactctcctttatggtcgagcatgtggcaagtcacatggcaaacctcctccgtatctttataaacttccagtgcctcgttcataaaacgcagaaaataaggagaaacgatcaaatcgtcttccaagacgatcacccggtcgtgcgtctccaaaaccgaagtcacccccgcaatcacattggctgccagccccttgttctccggtcgctccacgacattcaaccgtttgaatttccacggttcggcaatcacccgacgcacggcggccaccgcctcctcgctgccctgtttcgcgccgtcggcgaaaacatacaattcgctttccgccgccagctcgttccgctccaaatattccagacaagcgcgcgtatgttcaggacgattataaacgaataaaacaatcggggctaactccatatcggtttaatttttgaatgaacattttccaaaaacacaggtcttccctgtttgcaaaatcgcttgatttctgcaatagaagggtatcgacacaaaagccggacacttgtgcctgtataaaaacaaaattctttgaatcttccccgcaataaagcgagcacgcccggtttcaaaggagctaatacccccccccacagacacttagccattcccgaatttaaatccgaaacaaccgacaaataataaaccctatccaatttcatttgtgtctggcgggtaatcggtcgattttgccggtcatgacaccccgaagtcaacggagtgtatcccacccgataaccatagaatcgcattcggtgaatatagtccacatcttcgccataatgaaaaaacaacggcgaaaaacctcccacctttttcaacgccgacaccgggataaaccagaaagccgcattaacgaaagctgcttcgacgatatccgattttttcgatgaaaccgccgatgctccccctacatacttggcgaacgaaccgtcgagatgctcccccttcccgtcaagatgcaccggcgaaagcactccgtaatcgggatatttttctgccaaccccaccaaagtccccaccgtattcgcctctatccacgcatcctgattcacgagaaacacataatcgtaatcctcctccaacgccattctcatgccgatgttattcgcttgcccgaatccgagatttttcctactccgcacaagacgaatccatcgatacctctcggcgatgatcgacaccgtccggtcggtcgaagcattatcgattaccacaagatccgaggggtaatccgaatcccgaatactactcagacatcgttcgatccacggctcgaaattatacgaaacgatcaccgtcaagaccctcggtcgagcaactgctacctcgttcacgcttcacctcctctcttcacacgactcttcaacatcgacagcatctcctgcaacatctccaatttcaacatgtatgctccgcccaaatacaaaacgacataaacgaccgggacaagacacaaccgccacaaatcgctcggcaaaagcagataaacgccgcacgagagtatcgccgacgccaacgccaagataaaatacggaaaaatatctttcacatactccccgaaaccgtatccgagaaagcgacgggcaaaaaagatcgaagccgccagagacaacaccgaataagaaatccaccaccctatcagccacaaaatgcccgaagaataaaacaaagcgatacccgcaaacaaataaatctttttcccgatttccagttgtaaattcagccgggaatagcccagactattgaacaaatcgaaaaacaaaataataaacggagagcatattcccgaaaaacaaagcaagcggaaatacggcacggacggaacccattgctctttcaacatgatcgatatgagcggatacgaaacgacgaccatcaacagcatgataggaaaaatgaaaaatgcgatggcccgtacattcttccggcaaatccgtttcaaccgttgcaaatcgtcttgcaccttcgagaaaacagggaaagcgaccgaacggaatatattgctgataagcgaagaagctatatcctgatacttgtcggcctgagtatagtagccggtctgcgtcatgccataaaacttaccgatgataatgggatatatcttgttaaacacattgttgataatacccgaaacgaccaagttggaactatatccgaaaaactcccgcaacgaagccatgcgaaatatccatcggggacgccagtcgttaaacacccagaaaaaaacagccctgaaaaacgagagtccgagtgtctgagccaccaacgaccagactcccataccgccgtaagccatcgcaatggcaacgaccgaagcgatacccaacgaccacaaattgacacgagcgcttacagagagcttgaaatgcttcaacaacaaagtctgctgtataagggaaagtgcattcaacggaatcacgagaaacaaaatccggcagatatatatcaaatcagggactttaaaaaacactgcaatataaggagctgctgcatacaacaaaccatacagcacgcaactgattgccacattcacataaaacaccgtgctgtaatcggcctgagtagcctcctttttccgaatcaaagccgaagaaaaaccgctgtcgatcaatatccccgacaaggcgataaatatcgtgagaacccccaccttgccataatcctcaggagaaagttgacgagcgagaataataccggcgacaagatagaacaactgctgtcccaacttgtcggccgtgctccacacgagcgctttcgtcgtctttctcttcaaattctcctccatcagctaaatgaaagtcgataaccttctgctccacaaagatagtgaaaggtgagtgcagagacaaacgaaaaccttgtttccgatttgactatgccgaaccgcagcctatcttcgtactcacaaagatagcgaaaggtgagtgcagaggcaaatggaaatctcgtctccgatttgactatgccgaaccgcagcctatcttcgtactcacaaagatagcgaaaggtgagtgcagaggcaaacggaaatctcgtctccgatttgactatgccgaaccgcaatcctatcttcgtatgtacaaagatagcgaaagtcgaaagcaaaaagctcaatcgagcttagttttttgctgaacaagataagctccgcgggacgggtctcgcatttttcggagcgaaaaagcactcatatattttctcttttcgtaatttcgcatccgaaaacagttgtgtcaaacaattttaaaggctattttcagttattataaatatccggacttcggtgtgtaccccccgaaaagtctggaaaagagagtatgcagattgtaagaatcgttattctaaccctgtgttgtttggtctttgccacagcaaaggctcagattgatacgcagttcagccaatactgggctctgcccggctattacaatccggcagctgcgggaagttccgacaagctcaacatactcacctccacccggcaacaatggataggtatgccgggagcccctcagacctatttcgtgacaggcgacatgcctttcaaattcttgaaacagaaccacggagtaggactggtcgtcacttccgaaaccgaagggctatactcccatctgattttaggagcgcaatatgccttcaaaatcaaattatggaaaggagtactcagcctcggcatacaactgggaatgctcgacgaacgtttcgacggcacacaagtcagcatacccacgagcgattaccatcaagccaccgacgacggaatccccactaccgagttgcaaggcatgtcgttcgatatgtctttcggggcatggtacacccacccgtggttctatgcgggaatttcggtctcccacctcaacgagccatcgatcacctttgaagacaaatacgaaacatacatcggcagatcctattattttatcgctgggagcaatattcccattaaaaacacgttatatgaagtgcagccctccatgatggtgaaaagcaacctcaacatcacgcagtacgagttatcctgccgtgtaaaatacaacaaactgttctggggaggcctttcatatcgctggaaagacgcatgtatatttatgataggtgcggaatataaaaactttatagcgggatatgcctacgactacccggtatcggccattgtaaaagccagtagcggaagccacgaagtatttctcggatacagtttgaaactcgacctgtccgataaaaataaaaataaacacaaaagcatacgcataatgtagcctatgaaaaagataatcgtgtatatcacccttgccattctcgtcgcagcatgcgcaccttcgtcgcgccatagcggtgaagttacaggtgtcggaggtacggcatggaatgagcctacaccctacggtatggttctcatttctcgtggatcctataaaatgggaccggccgagaaggacagtatttggggaacacaacaagaaccgagggctgtctctatcgatgccttctggatggacgaaacggaaatcaccaactcaaaatacaaacaatttgtattctgggtacgcgactctatcattcgggaacgcctcgccgatcccgcctatggaggcaacgaagtgttcaaaatcgaagaagaccgggagggaaaccccatcaagcctcggttgaattgggataaagccattccgtggagaaaccccaatgaagacgaagctcgtgccatcgaaagcgtgtacagaatcaaccccattacgggagaacgtcaactcgatgcctcccaaatgaactaccgctacgagatcttcgaccacaccgaggcatccaaacggaagaaccgtctcgacccggcacgccgtgacctcaacaccgaccatacccccgactacgatgaaatcgtaatgatatccaaagataccgcatatatcgacgaagacgggcgtatcattcgcgagaccatcacacggccattaggcagcgagtttgacttcctcaatacctacatcgtcaatatctaccccgataccaccgtatgggtaaacgatttcgagaatgcctacaacgagccatacgtgagactttatttctcccatgccggctataacgactatccggtcgtaggggtttcgtgggaacaagcaaacgcattctgcgcttggcgcaccgcgctcttgaaaggttcggtgggacgtaacgccgttgttatcgaaccttacagacttcccaccgaagccgaatgggaatatgcggcaagagccgggaaaaacgaaaataaattcccgtggacgggtaacctgcctatggccgaaaaagggtgtttctatgccaacttcaagcccgatgacgggaattacgtgaaggacggaaacctcatcacttcgccggtaggctcctattccccgaacgagttcggattatacgacatggccggtaacgtatcggaatggacttcgacagcctataccgaagccgtatcgcaaaacaccagcgaccttaaccccgaatacaaatataatgcggccaaagaagacccctaccgcatgaaacgcaaagtagtccggggcggttcgtggaaagacgtttccaacttcattcgttccgatatccgcatgtgggaataccaaaacgaacaacgatcctatatcggattccgttgcgttcgctctcaaatcggattcgcaaaagcaaaaagataatatcaaaacccgataaaaccaatcatcaaggatcatgggaaaatacaaaagatataaaaacagtattgaaaagttcttatccagcgataaaggacaacgatttttcaatttcgcatacagtataggcgctgcgattgtaatctggggtgctctgttcaaaatcctgcacctccccggaggcagtctcttgctttctatcggtatgggaacagaagtgctcatgttcattctatccgccttcgacactcccccgaaaacatatcattgggaagaagtttttcccgtactaaatagtaaaaaccccgaagaccggcccgaattttcaggagggaaaggaaccgtcattatcggtggaaacggcaaaggcggaggtagtaacggagggaactactccgatgtcaccccgtccgatgccaaaagagctgtgggaatacccgaaggcctcaatttaagcgatgccgacacgcaaagcctcaccgatagtattcaaaaaatgtcggctgccgccgatcaactttcgcgtatggcagaactgacagatgcaacccaacaatacctcacccaactctccggtatagccgaacagatggaacaattaaggagtgcgaccgagagcctcaccgccgtatcgaacaccctcttgcaatcttaccgcaacatcacggaaaactccgaaggaatatccgacacctcgcaaggatatgtttcgggtatggaaacgctcaaccgtaacatcagcgggctgaacaccatctatgagatacagttgaagagcatcagttcgcaactcgataatatagaccgtgtaaacaacgggctgaaaaacattcgcgacatgtacgaacgctctgcttccgatagctcccgttattgcgaagcaaccgaaaaaatgacacagtatatacagcaactcaattcggtttacgaaaagatgatcacggcaatgaccatcaacatgtacagacctatgggaggagctcccgtggaaatgcccgaaaaaccgaaagacgacaccgaacaaaaataacacatggcatcgaataacaacagacttacaccccggcagaagatgataaacctcatgtatatcgtcctcactgccatgctggccctcaacgtgtcgtccgatgtactcaacggattcaagcaagttgaagacggattggaaaggtctacctcgaatgcttcgctgcaaaacgatgtcctctaccaaaaactggccgacttcaacagtcagaatcccgaaaaaggaggatcgtggtacaaaaaatcgctggaagtaaaaaaacagaccgccctcttgtacgactacatcgactccctgaaaaacgtaatcgtcaagaaagccgacggtaaagacggcgatgtaaataatatcgaacatcaagacgacctcgaagcagcttcatacatcatgctgtcccccgcccagaagcaaggaatgaaattgagaaaggagatagacgactaccgcaatctcatcggcagtctcatgaccgactccatcaaaagagcagcgatcgaaaactacctttcgaccaccattcactcgggcaacagaacccaagccccctccatgtgggaaacgacgctgttcgaaaatatgccggtaatcgccgccgtaaccattctgacaaaaatacagagcgacgtgcggtatgccgaaagcgaagcgctgcacaccctcatcaataacatcgacgaaggagacgtacgtgtcaaccagttgaacgcgttcgttattcccaattcgaaaaacattatgagaggcgggaaatatagtgccaacatcgttctggcagccatcgatacgacccagcgaccggccatatacatcaacgggaaacaactccctcccgaaaataacggtttatatgaattcgtctgtggaagcaccggaatattcgattttcaaggctatctcgaagttccgcgcggtgacggttccatgacccgtcacgaattctcttcgtcctacaccgtagtagagccgagtgcgaccatatcggcgaccttgatgaacgttctgtatgcaggtatcggtaaccctatcagcatatcggttcccggcatccccaatcacgccattcaagctacgatgacgaacggctctctcacccggcaaggtgacagctggatagcaaaaccggcgaaagtaggacaagatgcggtaataaccgtaaccgccacaatggacgggcgggcgcaaacagtcgccaacacccagttccgggtacggcaacttcccgaccctatgcctttcatcgcctataaagatgaaaacggttacgaacaaaaatacaaaggagggaaacctttcccaaaaacacgactgctttctgcgcccggtattcaagccgcaatcgacgacgacctgttgaacgtcacctatcgggtgctgcgattcgaaacggtctttttcgactctatgggaaatgcgattcccgaggtttccgacggagccaatttctctcaacgacagaaagattcgttccgcagactatcgagaggaaaacggttctatatatcgagagtccgcgccgtcggccccgatggtatagaacgcgatctgtcacctatcgaagtaattgtaaactaaggccaatatgaaatataattcagcaaatatgaataccctgataaaaagctgtttgaccctctgcctgctatggtcggcaatagggagtcatgcacaagtaatcaaaaaaagcgataccgacgactcgaaaaagacaaccaaccaactcagcgtccgggctcaatcgctttatgacactcaggatgcatcggatgccgacattccgtggatgagggtaatctatcggcaaatcgacttgaacaaagaaaaaaacatgccgctctattatcccgaagagtccaccgaaaatcaggagaatcttttcagaattgtcatgaaacttttggcgaacaaccagataccggcatacgaatacctcgatggacgagaaatattcaccgacgaatatcgcatcaaagtaaaagaaatgttcgaccgcttccatatcctgtatgccccggcaaaaggatactccgagaagaatccccgcttcacggtagaggaaagcgatataccctccaacgaggtactctcctactatatcttggaaaaatggatattcgaccgccgcacctcgcaggtaaaaccgtccatcgaggccatctgcccggtacttcaccgtacgggcgacttcggaggcgaagcagtcaaataccccatgttctgggttaaatacaacgacatacgcccctacatcgcacgccaatacatcttggcgagcaacgaaaacaacgtacagcaatacaactacgacgattacttccaaatgcgaatgtacgaaggggaaatctacaaaacccaaaacctgcggaaccagtcgctcatgcaaatgtatcccaatgactccattcggaaacaagcacaagacagcatagaaaaacaactgaaaaactttaatgaaaatctatgggttccctcccccgaagaaatagcgaaagccaaagaagagcaagcggccaaagaagcaaaagaaaacggagaaacgctcgacaatgacaaacaaaagaaagagaaaagccgcaccgctcggtcttcacgggcaaaaaaacaaaaagaggcgaaagtaaaaaagcagaaacaaccgaaacaaaaaaaatcatctgctgcccccgtacgctccgttcgccgaactcgttaaactatattaaaccataaaagagttttctgaaattcagaaaactctttcttttatatttctcaaactcttaatattaatttgagcgaatcgcccatatcgggttgtccgattcagataaaatttttatctttgtccgtattgactttatgaaggataccatatgcaaatgcctccaaaatctacggatacgaatctaaatccgcaaacgcaggaacattttctactttcttttgaaaggcccgcttcctcttccgaggataatacattactcacatcttccggcaaacttacgatcgtattatgtacccgaggttgtaaaaccgtgcaactgaactttacagaatatgtactcgaacccggtagtatcgcgttcctctaccccaacacgatttggaaaccgataaaaacgagcagcgactttcaggcacgttatctctcgatgagagaacattcgcccaaagaaagaaatgcttttttggacttggaaaccattttctcgttaagtacctatatcgccagacacccgcatacgtccctttcagcgaatgagtcgatagtggtcgaaggctattttcgtctgatacaaaacagatacgaggcccacgtaaactatgcgatcatacgttctcttatttctgctttcatcttggagttaaaccaaatgtttgccatacgggtagaacgcaagaaattgaaaatatcccgtaaagaagatattctatggaggtttctctccttgcttacccagcattataaagaaaatcgcagcgtcgatttttatgccgataaactctgtatatcgcccaagcatttatcctcggtcatcaagcaattaagtcacaagaccgctcacgagatcatttccgacgtcgttattatggccgccaagcaactcctaaaaaccacgacgctaagtatccaagaaatttcggaagaactgaactttgccaatcaatctttcttcggcaaattttttaaacaaaataccggacaatctccgtcctcatatcgaggtgaatgaccgtctataataaataacacactattcacaaataaaaacgataaacgacatgaagaacattgtgctatttctatcggccgcttgcctgttatccgcacctatcttcggacaacagcaagaaaatcgatttgccgaaattaccgacccgcaattactcagtatcaacaagctgccgcctcacgccagtttcacctcttacatcgacgagacatcggctttgaacaaggacaaggcgaacggaagtttctacctacctttgaacgggatatggaaattccattataccgaaaaattcaaagaaagacccatgaatttcatggagcccgattttaacaccgccgattggaaagagataaaagtccccggaaactgggagctgcaaggattcggcgaccccatctacgtaaacgtagggtatgaattcgtatctccgggattcgacaaatatctccaagagcccaatcctcctatggttcccgaagcgtggaacccgaccggtacataccgccgggattttgccctccccgcaaactggaaaggaaaaagaatctttctaagcgccgatgcggtaaaaggtgctgcttacttctatctgaacggtgaattcataggtatgtcgaaagcagggaaagttccggtacaattcgatataactcctgtcgtaaaacccggggaaaataccttagccgtacaaatgcacagattctccgatgccaattatttcgagggacaggacttttggaggctgaccggatttgaaagagacgtatatctctatgcccagccgcaaagccgaatcgctgatttcgaagtacaaacacctctcgactcatcattcaagaacggggtattcaaactcgatgtaaaagtacaaaacgacgaggttaaggcgcgttccatttccgtttcgtatcgactcatcgaccacgccgaacaaaccgtagcccacggggaaaaagcgataaaactcgacaagaacagttcacaatccgtctcttttgcagaaacgataaacgacgtaaaagcatggaccgccgagactccgaatctatacacactacttatttcgactgccgatgaaacagggaaaatcgaagaatgcattccttcccgtatagggttccgcaccgtcgaaatcaagaacaaacaactgttagtcaacgggcaacctatccttgtaaagggggttaacgtacacgagcacgacccgcttaccggtcattacataaccgaagaaaccatgctcaaagatttcgagctttggaaaaaatacaatgtaaatacggttcgtacttgtcactatcctcaacaaaaaagattttatgaactatgcgacgaatacggattctatgtcatcgacgaagccaacatagagtctcatggtatgggatatagcttacaaaccggaggaagtctcggtaacaatcctctctatttaccagctcatttagaccgtcttaaagacatggtagaacgggataaaaaccacccgtctatcatcacatggtctctggggaacgaggcggggaacggttactgtttttatgaaacttatttgtggctgaaacaacgggatccgtctcgtccggttcaatacgaacgtgccgaacatgaatggaatacggatatcgtttgccccatgtatatttccccgaaaggaatcgaagcatatgctcttaaccccaaatcgcatcggcctcttatcctctgtgaatatgcccacgctatggggaacagtttgggaaacttccaagattattgggatatcatcgaaaaatacgatcttcttcaaggcggctgtatatgggactgggtagatcaaggactcgaaaagacaaatgaaaaaggcgaaaaattctgggcttacggcggtgattacggagataccggaactccctccgatggagatttctgcatcaatggtatcgtatatcccgaccggaaaataaaaccacagaccattgaaatgggcaaggtttatcaaaatatcaaattcaaaaacttcgaccgaacgaaaggaacgatcgaagttcaaaacgaatttttcttcacagacctcgacaaatacgatttcgcttatgcggtaaaagggaatgggaaagtattgaaaaccgggaaattcaccgtctcgttgcgtccgcgtcagaaatgtacggttacattgaacgggctgccgaatatggataaagaaaccgtagactatcaaatcgaattcgaggccagacagaaaaaagcggaacctttccttccgcaaggttatgtcgtagcacgcgaacaaatctcggtcaaaccggccgtcaagccagttgcaaaacccgatcaaggagtcgtctcacaaaccgataatggtgacgagacgattttctccggcaagaatttcagcgttacattcgacaaaaacagcggcttgatcacctcgtaccggtataaaggaaccgaatatatcctcgacggattcggactccgccccgctttttggagagctccgttagacaacgactacggctataactcacccaagctattgggtaaatggaaagaagcctcccaacagccccctgtcgcccgttcattctccatcgataaaaaagagaacgataacgttcgtgtcgtttgccgatacctttacccgcaaacccggtcggaatgggaaatctcctatacgatattcggtaacggggttatcaaagtagacaacacgttcgaggtatccgatccccaagcgcccatgattccccgcgtaggattgcgtatgcagttacccgactcattcacccggttggaatactatggccgaggaccgtgggaaaactacatagaccgccgtaccagttgttttatcgggcgatacgaagccaacatagccgacctttacgagccgtatgtacgtccgcaagaaaataaccatcgcaccgatgtgagctggtttgctcttacaggcaaaaagaacgctttgctaatcgtcaccgacagcttgttggaattcaatgtttcgaactatcccctcgaatcgttcgatagcggagaccatcgtgacgacggtcgtcagcgtcccgaaaatcccgggcaacgtcacaactgcgatcccaagccggccgaactggtcgacctattcatcgattaccgtatgatgggactcggcggagacgattcttggggcgctcagcctcatgaggaataccaaatcaatttagctcccggaaaaatttcttacggattcagcttaattcctttggataaaaacgctaactttgagaaagccatcaaacaatactaaaattgccgaatatatcccggaatgacttccgggatatatttataaataaacattttatgagtcgattacccaaactgtctttactcgtttcgctcctgtttctctcctcttgcagtttattcaaagaactatcttccgacgatgttacccgaattacatcggaatatttcgacgaaaaccacgacatggtattttattcgaccttatcgcttctacaagccgagcagttcactatcgtgcaagccgacaaagagagcggaatcatacgaggtacacgacacatcgagcgggacgatgtagaaaggaatttaaaaaccttcggtacagctaccgaaagggaatcgaccgaagccgtattcctcattctaccgctttccgacaaacgtacggaggtaaagctctctctttaccggaacgaactgaccgttacccgcaaaaacgaagtcaatcaaaagcaaacctcccataccatgcttttgaaggaatcgacctacgacaaatggctgaacaaattaaaagccgaagtgaaaagaagaaaaaagctcgtttaatcgcccaccgagagtctcttgtttttcaaacggcattcacgatagcctatcgatgtctttggtggctatctctttcgacgaacttttttagaagattgttttttcagcttgacaatgggatcgaccgcccgatgcgaaacatgatttatcgtcgaaaggtctgaacactcctgattgtttcgcaaaagagaagcaggtgcgacaagcgggacttgcgactgctcacggtcttctatatccggcaattcgcactcctccctgtccatatcgatgtccgccacccgattcgcctctttcggagagtccgactccgacacagcaacttcgggcatagcctctttttgattcgcaaacaactcctcgaacttcttttcatatttgcgggcatagcgttcgagcgtgttgatacaagtcatgacactcttcacttcgtcacgatcgtttatcacatctaaaccgagcaaccgttcgtagtaccggaacaatacttcacacctcaacatctcaatctccatacggcgcatcgacagctgttccaccattttttgttcttgtgtttccattgttttttcgacaaagtaaaaacaagtcacacactcatttatggcatgatgatacaaaaacaaaatagaaaaaccggttaaaatattgcaaaatttatttttttatttatcttgcaaacgttaatctataaaccataaaaccatgaaaacaaacagccgaaagcattcaatatattataagaatatcggaggatatttatccttagcatgggctgtttaggattaaccgaatagacactaaggccattcataagctatcgactaaaattactattaacaagagttcatatcagcaacatatgttcgaattaaataaatacgaaaaacaagtggaaactaatatctctatttgtttcatcttgatgctcatgagcgatttgggtacagcagtagcatgggtaggactggcagcctgtgtgatactgttcggccaattggtctattatccctttcggtgcaagaaaaaagacgaatatttatttgtgccgtggtggattctttatctgctttattggtgtatatttacttattggactgttcataatttagttgccgcatcatgaaaaagaaaagcaaatcggttatccgcttgaaatacatcgagctaatcgcgttcatggaaacatggcttgcggggctttgtttcgttgtaggcatcaagtggctcatcgggctgtcgatagccttgtttgccataccgctgtgggggctaatctcccatcgacgttggtgcagagctcacaacgaaccgtatgccaactgggagttcttctacaccgttatcgcttggatcgtatatatatttataacgcttgtcatctatttccatttctttacgtgaagttacacaaagtactccgtaatgctacgggacacggcaggggagtggttgctgcccaatatgctccgcttaccacggttttcaacccctccgtcactgcgtgacacctcccctatattttgcatagcaaaacaccccgcaatgctacggggcacggcaagggaggtggagaatagttcaggcttgctgcatagccgatattttaatcgacagaaaagaaataaaaaagagagggtacatcgaaacgatgtaccctctctttatagagcggaagacgaggctcaaactcgcgaccctcagcttggaaggctgatgctctatcaactgagctacttccgcaatttttttgtgggcaaagatggattcgaaccaccgaaggcgtaagccagcagatttacagtctgccccatttggccactctggtatttgcccttaaagcgagtgcaaagatagcactcttattttaatttacaaacgaaatcgtgcatttttattgccgtcaccgccgcttcgtcgcctttattgcccaattttcctccggccctatcttttgcctgttgcatggtatcggtcgtcaacaccccgaagatgaaaggtatcccgaacagggtattgaggtgtgtaataccttgcgtgacactttgacaaacatagtcgaaatgaggcgtatccccccgcacgacacagccgatggcaatcacggcatcgggctggtaaaactcggccatctgctgcgaggcaaaagtcagctcgacagttcccggcacacgggccacatagatattctcctcctttaccccgttacggagcagggtatcgacagctcctttcaatagagcatcggtaatctcggcattccattcggcagcggcgatagccactttcatgcccgaagcatcgggcatagtatcggcgtcataagacgataaattgtgataagcagttgccatatattcggtttctctttttgaaataaggccgcctttcgaaatgagagacggccttaccgatatgattgaatttcttaattacttgttttgggcacgctcgatgtaacgttctattccacgagcatcgttggaggtaggatatttgtccttaatctcctgatagagtttcacggcagcttcgttgttacccactttctcataagccgcggcagcctttttcaaatagatgggactgaaaaccgcattgtcggattccttagcggctttctcgaaatacttggcactctcggcatatttttccatatctaccagacagttcccgatagcggcagtcacggcaggagacaacacggtctcgtccgcactgaatgcagaaagatatttctgtgccgtttcgtattcccctttttcataataagccaatcccaaataggcatttgccaaattaccggcagctgtcgaaccgtattggtcgacaatcgtcaacaaaccgtcgaatttttcattaccgttaatcgccaaatcgatagaatcgttttcaaaagccataacagcctgatacatcgcagcctgagctttatcctcacggggcaacagatagaaatgacgtactcccaatatagctccgacaatcaccactacgaccagcaatccgagcaagaggggtttctgatacttttcaacaaactgttccgacatagagagagcctcattcattttttcaagctcgtctttttctttttctgccatatttttcttgtcttttaattattttttatcctctacacaattcctattatacagaatcgagtgacaaaagtaatttatttctttttataaataaaatttcatcttcatttttttgtacgaggagctctaatagacccaattatgcgcatgatttcccctactcccacgactttttcattccatttccatcgaacattattcgcaaaaaataaaaaagtttgcgtatgtttgtagaaataaaagataacccgacatgattctttcccggctatccatagtcaatttcaaaaacattgcccaagcggacctgagtttttcgcccaacatcaattgttttttaggcaataacggcatgggaaaaagcaatctgttggatgctatctattacctttcgttttgtaagagttatacccgcaatcccgattcgcagaacatcagacacggagaagacttttttgtcgtacaaggttattacgagcgtaacggaaacgaagaagaactgtattgcggtatcaaacgccgacagaaaaaagcgtttaaacggaacaaaaaagaatatgaccggttgtcggatcatatcgggtttgcccccttagtcatggccgctccgtcggacaacgaattgattttaggcggaagcgaagagcgaagaaagttcatagacttggttatcagccaattcgacaaacaatatttaagcacgctcatacggtacaacaaagcgttggaacaacgcaatgctctgttgagacaggagtgttccgaagagatgctatatgacatttgggaagagcaaatggactcgacagccgcacaaattcacaacagccgcgaccgttttctgcaatcgtttattcccgtattccggcggttttacaacgaaatttcatcgcaaaacgaatcggccgatctcatttacaaatcccatctttccgagggcgcactgctgccgcaactgaaagccaaccgccacaaagacctaatactgggatatacttcccgaggcatacatcgggacgacatggacatgatgctgggcgagtatcccatgaaacgcataggctcgcaaggacaatgcaagacttacctgatcgccttgaaactggcccaatacgattttttgcgggaacaaggcgataccacgcctatcttgttgctcgacgatattttcgacaagctcgatgccgagcgcgtaaaacaaatcgtgaaattggtttcgtcggatcatttcgggcaaatattcattaccgacacaaaccggaagtatttggacgaaatcatacatttcatcgggtcgcaatacaacattttctccgtcgatcggggagaagttaaaatcttggagggaaaaacgccatgaaaaaacaagatgcacttcctatcggcgacattatctcccaattcatctcggaaaaaaatttcgggcagaaactcgacgaaacgcaagtcatgcgcttgtggccccgaattgccggagagacggtaaactcctatacgcaatcgatgtatgtacacaaccgaacgctctatgtgcgtctatcatctgccgttcttcgcaacgaactgacgatgttgcgaaacgaacttctaacccgtatcaacgcagaattcggacatcgggttatcgacaacattattttcagataaagataaaaaaaaacagacaatggaaacgacatctcctgcatttcgacacacgcttccgcttcaactccgcttcaacgacatagacctgctggggcatgtaaacaactcggtatatttctctttctacgacttggggaaagcccgttatttcgagaccgtgaaagcccagaatatcgactggaagaaagccgatgtcgttgtcgccaacgtcaatgccgatttcctatcgcccatctacccgggtgaacccatcgccgtgcaaacctgtacggtcgaaataggaaaccgcagtttcaaattgttacagcaaattgtcaataccgaaaccgggcaaataaagggcgtttgccacacagtcatggtgggattcgatataacggccggtcgtgccgcccctatcagcgacgaatggaaagaggcgctttgccggttcgaagggaaagaacttcggaaaaagtaacgaaatatagcacgtagtccgagctttttcgtcgcgttttattacttttgtacaagataaagcctaaaacagatatgaattttaccgaaaaaatagaggaaatcctacaaaaagaggctcaggccattctggatataccggtcacagaccagtttgaaaaagccgtcgaacttatcgtcgagcaggtacatcgaaagggagggaaactcgttaccagcggaatgggaaaagccgggcaaatagccatgaatatcgctaccacattttgctcgaccgggactcctgccgtatttcttcaccccagcgaagctcaacacggggatttgggcatattgcaaaaaaacgatttgatgctggtcatctccaactcggggaaaactcgcgaaatactcgaacttcttcaactggcttcgaacctgatgcccgaattgaaattcatcgtcattaccgggaacaaccgaagcgaactcgcccaacgtgccgacgtatgcctttttaccggagccccgggagaagtatgcccactcgggctgacaccgacgacctcgaccacgcttatgacggttatcggcgatattctggtcgtaggcgctatggaggcgactcatttcgacgcccatcaatatgccctgcgtcaccacggaggatacttgggaacccgttccagagaacaaagtcagaataaataaaccacgaggacatgcgtaaaatcataggcataggagaaactattctcgacattattttcaggaacaaccaaccctctcacgccgttccaggaggttccacgttcaatacgctcatttcgctagggagattaggtgtaccggccacattcatcagcgaaatcgggaaagacacggtcggtgacatcatcatcgacttcatgaaaaaaaatggcgtttgtaccgagaatctggatattttttgcgaagggaaaacacccatctcgctggctttcctcgacgagaataacgaagctcgatacatgttctacaaccagtttcccgaagaaagactcaacttcgtgtggcctcgcattgaaaaagacgacattatcatattcgggtcttatttcgccttgaatccagcacttcggaaaaaggtatgcgagctggtggaatttgccaaagagagaaaagcaatcatctattacgatcctaactttcgcgatgcccatgcccatgaagctgtgaaactcatgccatcggtactcgaaaatctcgaatacgccgacttggtgaaaggttcggcagatgatttcaacaatctgttccacgtcacagaccctcaaaaaatatatacggatcatatcaaattctactgcccgaactttatctgtacgttaggcagtaaaggagtgaaactattttgtgaaaaaggcgacaaacattttgcgacaacccctgtaacacctgtcagtacgatcggcgcaggcgattcttttaatgcaggagttctgttcggactgctcaaacacgacattacgctcgataagctatacagtcttactcccgaagaatgggaaccgatcgtacgatacggaagggagttcgccgcgaccgtctgttgcagtatggacaactacataacaccggagttcgccgcgaattatattaccccggagtaatccaaacgccctataaatattctaaaataaaacaaaccccggtacggctaactatcgcattgtcttatatttgcaataaaatttcatcaccgaacgatatgcgttacctacaactttgttctttgctcctcgcattgagcgcttgctctacgcacagcccagacattgatgtggcgtgtgaaatcgacttgcaaaacaactacttgttaaaatgggaaaccacgccgaggatcgaaggagaagttcaagtttaccgatcgaccgaccccgagcatttcgatacagcaaaggaacctgtcgcaacagcaagcattcagacaggttacaccgttgtcccggatagtctgcaaacatatcgttattactttcttcttcggtttaacgaccgatacgaccgtatcgtagggccacgtgccgaacgattgaaatatatcgaaaacttccgggacttaggcggatatgaaaccaaaaacggcaaacaaatacgatgggggaaaattttccggtcgggcgaatttaactctttgacggcaaacagcatcaaccggataaaaaacatggggataaaaacattaatcgattttcgggatagcgaagacatcatcaaaacgagtcccgaactaggcttcgataatgtaatcaatctgccgggctcccttcattacagacaaaatttattaccccgactcgaaaaagaggaactgagacgaggagatgccaacctgttcatgcaagatttatacgtcgcgatggtttccggttcgaaaagagccttcaaatcaatgttcaaccagttgctggtagaagataattaccccatcgttctcagctgtataaacggaaaagactataccggattcgccgtatcgcttttactcagcgctttggatatacccgaagacgttatcatgaacgactatctgctctccaaccgttatttcgacaaacgaagaacctcgttcgatcctaaaaactgttgcgacgaaacacaagaagctctatcgttgatacaatcggccgacagccgattcctatcctatgcccgcgattatatccgtcaacagcacgggtctatcaataactacttggaagaagaattaggacttacacccgaaaagaaaaggcaattaaagcatctgctgctacactgatcttcgaacggtctttaagaacaattccaagaagcatataaacataagtcacaatatgaaaccgggccgattcgaaaaatcggcccggtttgtgttataccttttcatcaacgaacaatcaggaaacatggttccgtagaaaatcagaggaattaaacttgaatgttagcgataaatctcttgttgataggtacatttctgtcttcttggtgaatgattaaaaaagccaccgaatagattcttgaaaaatttaatccctccgtcactacgtgccacctctcctatatggctaacgccacacagaggagaaggttacaagtgaaccgattcccaaaagttggataagttcaacctaatcggaaacgtttcacttcatagttagcaccgaattactcaattcatctcctctatactgaaatcttcgaagcacattttagccttttccctgccgtgccccatagctttacggggtatttcaattttcactatcgaagatattttaaaactcctcctctgtgttttgctatgcaaaatataggggaggtggcacgtagtgacggaggggttgaaaacaacatctcatcaatctattcataccagatataaccccctctccctatattccttgctggaacaccccgcaatactacgggacacggcagggggagaggttaaaaaggagaaaaaccactaagaagctgttttaaatttattccgagacagattgagcctatgttgaagcagattggagttcgagatatgcagtcaatagcgggctattgacaaaaatcaagggattcaagatgcgagacaggggctcaatatggccggaacatacctgcctgcaatgataatattatttctctataaatttaaaacagcttcttaatatcgaccaatccgaaattattctgttttttcaagcagtatattgtactcaaatcgaatatattccgatttttatcgtacctttgccggcacaaacaaaactttaacgtacgacaagtttttattcaccctctccccttagccccattgaggacgaaaaaaggccttgtgcccatgcgataaagcaaaaaattacaacattataaatgaaaacatttcaagaattaggtatctgcgacgagatactgaaagcgatcaccgagttgggatacgagaatcctatgcccgtgcaggagcaggtaatccctcatctacttaacgaagaaaccgacttagtagcactggcccaaaccggcacaggaaaaactgctgcgttcggtctgcccgttatccagcgcatcgatttatctctgtgtaaaccgcaagcgctcattttatcgcccacacgggaactttgtttacaaatagccagcgacctgaccgattattcgcaatatgtcagcggattgcgtatattgcccgtatatggaggttcgagtatcgagagtcaaataaaaacactgaaaaaaggcgtacacatcatagtcgccacaccgggacggctcgtcgacctgatcgaacgtcgcacggtacaactcgaccatgtttcgaccgtaatcatggacgaagccgacgaaatgctcaacatgggtttcctcgacagtatcaacgcaattctttccaaagtaccccaagagcgtaaaatgctgctcttttcggccaccatgcccaaagaaatcgagcagatcgcgcgtacctatatgcacgaaccgaaagaggtggtcgtaggaagccgaaacgaaggagccgaaaacgtacgacacgtgtactacatggtacatgccaaagacaaatatccggcactcaaaagaatcgccgactattacccaagtatatacggaatcatattctgccgtacccgtcgggaaacacaagaaatcgccgaccagcttatcgccgacggatacaatgccgactccctccacggagagttgtcacaaacccagagggatgcggtcatgcaaaaattcagattgagaaacctgcaattgctcgtcgccaccgacgttgccgcccgcggactcgacgttaccgacttgacccacgtcatcaactacggattgcccgacgacatagagacttatacacaccgcagcggacgtaccggcagagccgggaaatcgggtgtttcggtcgccatcgtgcacagccgtgaaaaagggaaaatgcgcgctatcgaaaagattatcggcaaaaaattcgaacggggaatggttcccaccggagaacaaatctgcgagaaacagctcttcaacctcgccgaccgtatcgaaaaagtaaaggtaaacgaagaagagatcgccaaatacctgccgaacatctcccgaaaactggggtggctcaccgaacaagacctcatcaagcgaatcgtatcgctcgaatttaaccggctcatagattattaccgcgacacccctgatttggatatccccgacgaaaacactcgcaaacccaaagagggtaattttgcgaaggaaggacgtaacggacgtaaaaaagacattcgcacagccgaagccggattcgaacgtatatatatcaacttgggaaaggctcacggatttttcccgcccaacctcatcgaaatggtcaactccctcgtaccggggcgtgtaaacataggacgtatagacctgctgtcttcctactcgcttttcgatgtggaaaaaagcagcgctccaaaagtcgtcggagcattgaaaggcaacgaattctacggacatcgcatatatgccgagttggcgaccgataaagattacagcgcaccgaaaggaaaaagaaaaggcaaagaagaaggaggacgcagaactaacgaaaaacgttacgggaattcccgaagggaccattcggaaagccggtccagacgagaccgttcttcctccaagacaaagagaaactcacactcgtccaagaaaaaaaaaggataaatgcgctgtgacgcaaacttccgactacttgaatattcagatgtagactctatcaccatacgaaaagccggccaatcgttggtcggcttttcttttatattgcagaaacgaaattttcatctgggttcgattcagtaaaaatctgtgagggataaacctgaatttagcgatgaacttcttatcggtaaccacattccaaatctcttcggagaggttgaaaagatttcataagattcttaactgtaagggttaacgctttcacccaaatggcactttctctctattcccttacgggaacaccccgtaatgctatggagcacggcaaagggaagagggagatgcatcacttcgctcctgttatcgaaagtattaacacttctcccctgtgttttgcacagcaaaatataggggagaaacagaggagcggtagcgacgatgagaggggttggaaatatggcatatagtatttttgtagaactaacccctccgtcacttcgtgacacctcaccctatattttgtttgccaacaaaacacaggggaggagtgttaacgcccttttaccgcattatcttagcgaataagataaattgcatttatccctcgtccccgtattgcattagctacaaagtgacagaggggttcaaaacaacatctcatcagtcggtttatatcggacatatctcttctccccagctgtgttccgcaacatttgacggggagctgcgttagcaatagggaagtgcccacagggcgagggggttgaaaagattatataatttttgatggagggggtagaggtataaaaggacaatctccactaattatcgactgagtcttgttttctcctctcgatcctactatatttgcataaaatatagatatattatgaatatcattcaaaaaatcaagttgaataatccagaaaaagaaaacctgcaaaaaactctatatgaaatagatactctatcaaaaagatggacgggaattcaaaaatcgggagaatcggactccgaagcgatacaaaagaatatagaaacgactatttcggcttcgctctccctcgaaaacataccttacacggctttgcaaatccaaaagataatagcgagacaaaaagctaccaatgacaaaaaacagagcctgattacgggatacgataccgtactgaaagcactttatactcaccctcacaactatccgcttctcgaagacactatcgtcacgatacatgcggccctgtttcccaacgggaaaatacattcgaacgatgaaccggccggcaaacccagcgtcgtcaatttcctcgactacaaagcgcccactctattcagccgtaaccaagcggtatcggtcaataacgaaatacgggatttggtcgaatggaccaacgacgaattaagtaaacacgaacatcacgcactcgttatcatcgcagcttttgcctacgaattcatttccatacacccgttccgggaaggcaaaggagaactatcgcgcattctttccaccttgctgttactgcaaaacggatacgaatgggccaaattcgaatctatcgataatctcatcgagaaacgtcggacagaatattacggaaccttgaaagagggtcagcaaaatcgctactcatctcgcgaggatatctcggcatggattctattcttgtgcgatatatggcttcaatccatacgaaacctcgtccccgccccattaaccgagacgccccccacactcgattcgacggatattcccctacgaaacaagaatataacgtcacactctaccgaaccgggcaacccgcctgtctatctgaacacccggcaaaaacggatattgtctttcatggaagatgaaggcccggtaaaagtaagcgacatcgcacaagccctcaaacccgtgtccatcaacacgataaaaaaagatttgctctatctgcggcaacagaatttcgtcgaaattcacggagtactgaaaggttccatatatacgttgaaaaaataaaactttaaaaaggtgaaaaattaaaccgtttctccataacaatcggggcaaaaaatatatatatttgcacagtatgtgaagggtcggtcgtagtagagctcaatcgcaagattttgttcactatatacagctttccccgaaacaaaaacaaccttaacaatccattaaacacacatcaacccgattatctaaaaaggaaacaaaaagacaatgaaaaaaattcttgtaatcggagcgaccgggcaaatcggttcggcattaatgacaaaactccgcaaagagtatggcaacgacaacgtcgtagcgggatatatcgagggcgtgcctctaagcgatgagttgaaaaacggcggccctttggaaatcgccgatgtaaccaatgcccaacaaatcgcagccatcatcgacaaatataaaatcgactcgatatacaacttagcagccatattatcggcacaagccgaaaagcgtccgttattggcatggaatatccagataggaggagtactcaaccttctcgaaatatcgagagaaaaaggttgctcgctctttacccccagttccataggtgcattcggcgactcgtcgcccaaaatgaagactccgcaagaaaccatacaacggccgcgtaccatctacggagtgagcaaggtatcgtgcgaattgctgagtgattattatttctatcgctatggagtagatacccggtcggtaaggtttccgggactcatttcgtacgagacattgccgggaggcggtacgaccgactatgccgtagaaatatactacgctgccgtcaagggcgagaagttcgagattccggtcaaggcgggaacattcatggatatgatgtacatgcccgatgccctgaaagcgatggtgatgctgatggaggccgacccgtccagactgaaacaccgcaactcgttcaacatcgcatcgatgagcttcgatcccgaaattatctacaacgaaatcaagaaattctatcccgatttcgtagccgaataccgtatcgaccccgtgcggcaacaaatagccgattcgtggcccgatatgctcgacgattcgtgcgcccgtgccgaatgggactggaaccccgactacgacctcgaatcgatgtcggtagacatgatcgaccacttgaaaaagaaactccttaaataaacgcctatgttcacacaaatgaaagatcatctggcaaagcagcttgccgagataaaagcaaacggactgtataaagtagagcgtacgattatcacgccgcaaagttctgccatacgaattgccgaacgtagcggaaaagtgttgaatttctgtgccaacaattacctcggactatccgacaatccccggctcatttccgccgcgaaaaaggcgatggattcccacggattcggcatgtcgtcggtacggttcatttgcggggcgcaagacctgcaccgcgagcttgaaaaagcgattgctcgctatttccataccgaggacacgattctctatgcagcttgtttcgatgccaacggaggcgtattcgaacccttgttcaccgaagaagatgccatcatctcggatgcgctcaaccatgcatcgatcatagacggcgtgcgcctttgcaaagccaaacgctatcgctacgccaatgccgacatggaagaactcgaacggtgcttgcaggaagcacaggctcaacgattccgtatcatcgtcaccgacggagtattctcgatggacggtaatgtggctccgatggacaagatttgcgacttggccgaaaaatacaatgctttggtcatggtcgacgaatgtcactcggcaggagtcgtaggtcccaaaggacgaggggtaagcgaactgtacaacctgtacgggcgtatcgacattcacaccgggacattgggaaaagcgttcggaggcgctatcggcggattcaccaccggacgcaaagagattatcgacatgctgcgtcagcggtcgagaccctaccttttctccaactcgctccctcccgccgtagtaggagcaggaatagaagtattcaaaatgctcgacgaaagcgacgaactccatacccgcttaatggagaatgtcacctattttcgagacaagatgctcgcagcaggcttcgacatcaagcctacccaatcggccatttgtgcagtcatgctgtatgatgccaagctatcacaatcgttcgccgcacaaatgctcgacgaaggcatttatgtaacggggttctattatcctgtcgttccgcagggccaagcccgcatacgggtacaactttcggccgctcacaagaaggaagaactcgacgcttgtatcaaggcattcattaaagtcgggaaaaatctgggagtcctcaaataaaattacgattcctcatacagagacaaaggtcgtttccaatgttggaaacgacctttgtcattcgtaaatcgagccgacggtcaatctaatgattcagtagaaaattcatggggtggaaatgaatttcagcgatgtatttcttgtcgacaaacacattcctatctcctcggtgaacggtaaaaaagtagctgaatagcttttgataaaaaccaacccctccgccacttcgtgtcacctcccctatattttgcgttgcaaaacacaggggaggagggtattccatttctcactatcgtttacagtgccggaatgtaactatatcagaatcccaaaggaagggtgcgacacattgcttattaacctctaaaattaatttgctatgcagcaaattgaaactgtccccattctcccctgccgtgtcccgtagcattgcggggtatggcgctagccaataggggagatgacaagaagtggcggagaggttgaaaacgatatctcatcaatctgttcatatcagatatttacccccccctcgccctatgggcactccccctatattccctcgggaacaccccgcaatgctacgggacacggcaagggaagaggttaacaaatataccgatagtgtcataccaatcccccgctgttctaagttaaaatacaagggaagagtgtaaaatatctcacaatgtcgcagagcacgacagggagaggattaaaagtgctgctccgaaccttattccctccggcgctttgtgggtatctcccttctctcctattgcttcgcaacataggagagacacagaagaaacaatcgtttctgagaaaagggattagaggtataaaaagacagtctcctctgatttcttattgatccgatatcccataattatcaactgagcaaatttaatcgtataacgccttgttttttaataaaattcagctatatttgtaaatacgaactacatacgggactgaacatatacaagcaatcgaacgcttatcgactgtatcaagataaatcgaaccatgaaaacaaaccgagtcatcaaaatttttctcgcctcctccgaggagttagaggccgatcgttatcgtttcgggaacctcattagaaaactggacaatatttatgagaaacgaggcatacgcatcgaattattcgaatgggaggactatgacgccgcctataacggcatgcgcaagcaagacgaatacaacgaacgagtgagagcgagcgacatgtttctggcgctatttcataaaaaagcggggaaatttaccatcgaggagttcaacattgcccgaaaagcgttcgacgagcaggcttctcccaaaatatatacctatataaaagacctcgaagcaggcgaaagcgaaagtcgggaactggcagagttcaaacgactcatgctcgaagagctgggacactattggtgtcgatacagcaacttcgacaccatgcaactgcattttgtcctacaattgcaaatggtagaggccaccaccccgataaaggtggaggtaaaagagtcgcaggtgaaaataggagacagtacgatcgccgacttgaacaatgtgccttttacctcggagaatgccacgcacagagaactgcaatcacggaaggaacaactcgatcgggaaatcggtaatgccgagtcaggcggccgaagaggattcttcgggcaacgttcccgtatgaccgacgaggagctcgctaatctgagggaagaacgcgagagtgtaaccgaacagatagagcgacaagaaaaggcactcgtagacacggcaatgtctatcgcccgcatgcagggcggtgaatgtagcccccgtatgagaacagccgccgaactgtttgaaaaaggagagatcgacaaagcgggagccgttctcaaagaagacgatatggaagccgatgccacgaacgcaaaattgaaattcgatacagcagcgcagccaaccgccgaactcacccgaaacatagaacgatgtgcgggagaatacatgcttaaagctcgtatcgtcgtcagtggaatagccgacgaatcgagataccgacaagcggtaaaactcatgtcgacggcgatagaccttgtttcgggacgactgcccgaagaaacattggcagaatacctgttcgactatgccgtactgcttacagatgtaggtcaacaaacaaaagccctcgaaacgtgggaacggttgtcgggcatatacgaacgtttataccgcaaagcacctcaaaagtatgcctacggttacgccggcgtattaaacaatatggcagtactttacagcgataagggcgatttcgaccactgcctatccaaatacttgaaagccgtagatatttatgatcggctcgaccgggaaggaccgggtatatatgacgacgatatagcacgtctcaaaaataacctcggaacactttactccgaccgagacgaatataacaaagccttatcggagttcaacgaggctgcacgcatacgattcgagctcctcgccaaagacaacgaccccgattcccgatcggctctggccgacatttattgtaatatggctacggcattgcaattttcggaccacccccaagaagctctgcgatacatagcccaagcgcacgccatactcgacgagctggacaaagagtttccgagaatatacgagtacaaactgtactcgattttaaatcgggaaggctcgatttatacacggctcgaccaactcgacaaggcggaagaatccttgcaaaaatccctacaattggctgcgaatctcgcctcccgcatgccattggctcatagtgccgacttggccacggcaaagatggaaatgagcgggctgaactatgtgctcggcaaaaacgaagaggcaaggaagggattccgccaagcattggacatattcagacgattgcaaacgaacgaaccggtttacgaccatcaaatcgccaccgttctccaaaacttgggtgtcatctgccgccacgaggagaaatacgacgacgcggaaaagttcctcaaagaggcactggatattcgcgaaaggcagcacgcccaagccccatactccttcaccgccgaccacgccaaagtctgccgggacttcggagatttgttggtcgatatgggagaaaacgaccgggccggcgagatgttcgagaaagcggcaacgctatatacaaatgccgccgaaaaaagcggacatctaaaagtatccatcgccgattcgatttatgcatgggcagatactcgtctcgactccgaggaatacgaccgggccgaatccctgttcaaacaagcattgagcatatacagcaggctcaccgatgacaaaacgagctacgacatggcacgaacatggagccgcatgggcgatctctatatgctttgggaaaagccccaagccgtgccttcttatgaaaaagcactatcgatgttcaaggaactgcacgccccagactccgactatcgagaagagacagctcacataaccaactgtatggcactaatttccagcgcaaacgaagaatatgaccgagcgagtgagctatacgaagagtgtatatcgatttacgaatctctctgtaacgacgggcacgacaatcgagccgacttagcggaagcctattgcagtctgggcgaaacccattgcaatctggaagcagccgaacccgcccgcgaatgtttcgaaaaatcgttgaaactttatcgagaaataaatgcctgcccggttcccctgcatatcgacaaaatggcagtcgtattgaagaaactcggtatcgtactttacgtatgcgaagaatacgacacagccattacgctctatctcgaagcctacgaattactaaacgccatctaccggaaaacaggagaatgcggcgaagaattaggttcggtagcgctatgcctttcggaaacattcgcagataccggaaaagcccgaaaggcgagaaagtactacgacatcgctttgaaattcggagctatcgaagaagatgaggaggaggattacaacgatgacaaagatgaggaagacgaaatcgatgaggacatggaggaagatgacgaagacggcgagtgtgaagaaagcaatgagacagacgaagctcgaacgatagaagacataagaatcgccaagaaaaacgcccatcgttttaaaacggcatcggactatctggaagccgcaaaatgctatactgacaagggagacttgcagaaagcgaaagagttatatatcgatgcaataaacatctgcgaaaaatacctcgtcggaggatttaccgaagacacctatcgggtaaaagcagaatgttgcaggaatttcgccgatataatcaaggaagaaggacaccttgaaaatgctatggctttctatcaagaggctctgcgtatctataaaatactgaaattctattcaccggactatgaacaagccttatccgaagtagaaaggcgcataaaaattttcacataaaagagaccacttatcatacaaaaagttaaaaaatgatatatatttcaatcttgactatccttttaacaaacctttctgtctctttatcataaacttttaacacattaaaatttatgatgaataccatgaaaaaaggattggggttactcatgcctcttttcctaatggcgtgcagccaacaagctacgatcagcaaagacactctgaaagacaaaatcgccggtgggtgggcaggtaaaatgataggggtatcctacggactccctaccgaattcaaagcattgggcaagatgtatgaagattctatccattgggctcccgtccgagtaaaagatgctttgtgggaagacgacttgtatgtacagctaactttgatggacgtaatggacaaacacggtatgcaagccgaacaaaaaaaataccaagaggctttggcaacagccgggttcagactgtggcacgccaatgtacagacccgcaaaaattatttcgacagcatatttccgccccaatcgggacagcccgaattcaacctccatgccgatgacatagactttcaaatcgaagctgactatatcgggttcatgtgtcccggcatgccgcagacggccaacaaaatggccgattatatgggtcatatcatgaactacggcgacggtgtgtatggcggtgcattcgtagcctcgctgtatagcgaagcctatttgcagaacgatatccggtctgtcatcgaaaaagcattgctctctttaccggacgaaagcggttatcgcagaatcattgaagatgtcatcgcttttcaccaagaaaatcccgatgactggactaagtgctggcaaatgttagaagacaagtgggctcgcgcgaacatttgcaaccccggcacgaaatacaatatcgatgccaaactgaacggagcctacatcgttataggattgctctatggagaaggagatataaacaagacattggaaatatccacccgctgcggacaagactccgactgcaacccgtccaacgctttggctgttttgggtatcatcaaaggattcagcgcgttcccccaagagtatagagaagctatcgaaaaaatcggagacaaaccgttcgttcacaccaactactctttcaacaaagcggtggaacgcactgcggattatgccgaaaaactcattgtggaaaatggcggtaaagtaaccgaaaacagttactccatcgtactgcaagaaccggttgcccttcctatggaagatgcgttccccaacttggtatacagcaaacgcgcagccatcgtcgatgccgacaaagacagttgctggactttgaaagggaattggcaggatgccgaaaacggttatgtgaaatatagcgaacaagccggcgatgaaataacgttcactttcgaaggaacaggagcttctatcgaaggctggtgggttaaaaacggaggcaaagccgacgtatatgtcgatggtatattcaaacgcacgatagactgcttttactactatgccaaacaagaacaccgcaacataaacatcttccacatcttgaacttggaagaagggaaacacaccattaacatagtagtcaaaggagaaaaaagagaagaatcggaaggctgtgcaataggtgtccgtggcgccgtcgtttataaaaacggtacaaagtcatacgatgccatatagaaagccctacattcattcttatcggcagtaaatctcaataaatgtattccccctatattttgctgtgcaaagcacccgtaatgctacggggcacagcaagggagagggtaaaatattcaaagtaacatttcacgacacctttcgaagcccctgtattacacggggcaatgaaatagagagtgatgccccgaaggacaaaacgggcgggacatcgtgaaaaaatgacaaaggtcggcggggagtttccccgccgacctttgtttatgagggcatcgttccctgtatcttatttcttaatgaatttcactactttctcggcttctgcggtcgttaccttgacaagatagcaaccctttgccaaatcggccacgtcgactgttgtctctatcgccgttctcaccagttttcccgtgaggttataaatattgacttcaaactcgccgtccgtcacaccctccacatggagaacgccactcacgtagcgggcagatatcgcctctcgatcgttctctgctatgccggtttccggatcgtatacgaaataagcctcgaacgtgtaattgcccacgaactgttcggccggcatcgtgtaactgttgtcggaggccaaagtcaactccataatagctccgaattgactcgggccgtacatcactctacctaccttgtaatcctcagcaggatcgaacgtgatcctgaacgatgttccggcctcgatgggctcgccgctctcgtaactttgtgtgccgtcggcgctcgtcagtattatactaccctcgccctctaccacgctatacgttaccgtgtgggtgggcttggcctcgaacgtgacgcttatctccgtcgcacccgttaccgtatgggtctcgccgctcgtgatatcctcgccattaaccgtgaggctggccaagttataaccctcgttcggggtggcggtaatggtcaattccgaattttcttccaccgtgtttgctccgggcacaagggccacactgccgttcatcacggttagcgtaccgttctctactgtttcgggaagggtcacggtataagtggccggacgttccacgatccgcaacgtgaaatcgacgatgttgccgccgttgccggtaagggtattggcgatttcatcgggatgcccacaaggatccaagtgacaccagtctattttcaaacgcacgcggtattcgccgggagcaagactctcgggcaatgtgaaggagggaacatcgtccagtctgctgttattctccgtagtttcgcccttgctgttcttaccccactgagagtcactcgggctataaaacgtataggagaccagctcaccgtcggccgtgggatagtcgtcgctccccaaagtataagagaacgtgtagtccttgtcgtagtcgatgtagaggtagccatgcatccattctcccgcccaattaacgacaggctgtatctcctctccggcatatgcttcgaacacattgtcggtcttgtctacataaaccgcttgtcttgtcgtggaatataccgataccgagaaaggagaagttcccccgttcatagtgatactgcggacataccgctggtcatgtgacgagttcccttcgtacgtgcagtatgccggtacggcctcttcgaattcggcggtaaccgtagtctcttgcgtcagcgtaaaaatgttcacgtttctttccaatgccacatcgttcacccgaatttctttcagctggtatccgtcggcaggttctgccacgacagtcaacctcgtattttcgggtattccggttccgctaaccacttcggtggaaccattcatcactttcaatgtcccttgctcggggtcgggagcagcgattgtcacggtataaagcgtactgtaattggggaaattcaccaatgtacccgtatgtccgtgacctgagatatcgggaacttccacccccgaaatatcggtaaagtcataagcagccaccaaaccatcggtcgttccgtctacggtagcgtccatatcggctttaatttcgtccaaagtcaacgctttattatagaaacgcaggtcgtccatctcgccattcataaaaaaggagggaacagatgccgaaccgtcgctgttcgaatatccggctccgaccaaaacatcgaagttattttccagagacttagattgaaaatcggcgtgtagagatttcgattcacccaatacaccatctacataaatattcgtcgtattttcgttccagtcgaaaacccaagtcaagtgcacccattgattttcagtgaacgtgacacctgtaccgttacctttaccaccccacggcgaaccggcaggggaaaggttggtagagaatcgtgtactggcattcatatcgccccacatttcccaaccgacagtaccgctattggccgttcccgtataagaacgtttcgacacaaaacggcaagaactacccgagaaaggcattttcaccttgcaagtaaccgtgtaggattcaccgatagcaatattaaaatcatcggcagagggaatacgcatatagcgatccgtaccgttcagttgcaatgtaccttccgaaaccacaggaggctcggtaacatcggaagtgagccaatccatcgtgaatcgatagaacacgagttggaacccgtcttcacccggaagattactatcccatttaccctcttcgaccaaagcgcctattgtcccatcggacaaaaccgttaaagaagaataggcagaataaccgtctaccaaacgtttctttatcggccaagtctcaccatcgtcttcactcaaataaatcgtgacattctcacgggttgtcgtactttccggaagagagtgcaacaagcggctctttccttccgatccttcgtcggtagaataggagtaacgaatgatatcgccgttacaagccgggtctttcaattccgtctcgaaataggctttgccccaagtctgcccccggtcggtggatttacaaaaaatgcggttgcccttgctcggattgcggatgctcattaaaatatccccgttttcaagttccaccactttggcttcgtctcccgcagttgtagccgcattggtcgacaaagtccaattatcgcctccgtcatcggaatagatagcataattatgaagagggactccggtggcagaagtggcacgaatcgccaaaacaaacatcaaacggccatctttcaagcataagccgtgacccgatccggcaaaaccggcataccaactgctatggttagcatacacctgatcggtaatagctaccggctcgctccaagaaacaccgttgtcggtactcttggaaacatagattccttgccgctgactgggcgttgcattccatagcccctgatcacccacgaacatacaaatcaaatttcccgtctttttatcgagtaccacagccgggtcgccatatgttttaccgttaccgccctgagcaacgacaaccggctccgaccaatttttaccgttatcggtacttcttctcgacataatggaaatcgtattgggcaggtctcccaaactgctgcctcgtttgtccaccacagcgaccaacgaattgtcggcagcagtcaccaaagccggaatacgccaatattgggaatcatagtctcccatattaaacaagacggtccgctcgggagcgtccgacgcccacgtccaagaagcgcttatgcacatcaagaacagcaacaaaaactgtacactttttctcatgataatttttaattgttttgttaattattgactcaccggcaaaatccattcgatatcgacacgattctaccggagaaccttttatttttaatcattcagtttcaccgaataaagaagagataataactcacgaaattctcagagaccccagaagacaccatacaatacaaaaatttatagaaacgaaccccttactttcatacatactgtgcctctcgcggtatttgaatttttcagaaatcaatagccccttcttaataatattaagaaacagtcaaatttatatccataggctacacatatttttaatattaaaaaatcaaaatgatttcgggaaataaaaagaataacgtttcgcgcctcaggtacacccatctcctaagcaacgctctccccttcaatagtttaataagaattataatttgtgatcgattttcttcgttgaaacaggttcttcatagtttctatttcgtttttcatgatataaaaatgcatttttatataactccttttatataaaaccccaaataacactttatccctagtgaaaaaatctatttttttcacttaaaaaaaaaagaagaagacatgaaccaagctcatctatcccaagccgtcatcaaacctctgtaacataaaatcttacacataaaaagccggacacattatcacaatgtgcccggctcgtcatcgcttatccatcttttgaaaactcaatttgcaccttaaaattcacatatcacatttttttaacggtccgttactcatgcctacatatcgattctctttttcagcacccggctcttttcggccaagaagcccatcacatggctttcaatggaaaggtcgatggtactggtcaaataggaagtatctctatgagcgacggccagcacaaagtctttcactatcccgaaatcgccaccggcatgaccttcatatcccggcaaagaagatatatctttattccaaaccaatttcttatttgtcagaaaatcggttacagtaaattttttcatatctccctcgatccagcctttcgttcccataatacgggtaagacggccaccggtagccgtaaaggcttccatcgagaaggctccggtaatattgttatcgaattcgagcgatgccacgaaatggtcgcattgatcgttatcgcatcgataaacacatcgaccataatcggaggttctgagcttatcgagaatcaagctgtcgtacttgtggtttttacaatcgttatcgggaatatcgaacacatacaggaattgcctcctctgcaaatatatcttcttggcagaataaggacactgcgattctaccggacaatcgagacaacgctcggtagaaccgtcgggcgcattctccctcttgaacagtttcaaacctccataagccgataccgatttgcagggtttgttcacaagccaccgcatcatatccatatcgtggcacgatttcgcgataatgatgggagtcgtgtccttcgagcttttccagtttcctcgtacataggaatgggccatgtggtgataacgaatacattccatatgttgtatgctgaccaactcaccgattttacccgaatccaatacctttttaagcgcaatgaaataaggggcataccgcaagacgtggcaaatgcctacaatacggtcatagcgcttggcgtatttcaaaatatccgtacactcttttatcgactgggcgacaggtttctccaacaacaaatcgtatccggcagccatagcctttaaagccggcgcataatgcaagttatcgggtgtggcgatgataactgcatcggcaaatttagggacattgaatacttctttccaatcgctgaaacagtgctcatcggggatacgatacagattcttcatatactccttacgctctgtattgatgtcggctacacctacgattttcaaagagttaggataatgttccgagtaactggcatacgttcttccacgggctccggctccaatcacaatcgctgtaaccggtttatcaaccacagcctcttgactttccagatcggacgagagttcgtcggctaaattgtctgccccgaccgttccacccttcaacgttccgacagtctgcgatatcgcctgaaaatcggaaagagcggctgcaaccgtagtggctcccatcaaccttaaaaattcacttcttttcatttctatcaattatatgaatacaagataactccggccccggttcaaaggaaccggagtcatctcgaaaaaagttttcgattacttatctctttacaataaaaggcttggtcgatttaccctcttccgtcgataataccagataataaactcccggttgcatatcggcagtagaaattacctcatcgagttgtacaacgtaatatgttttttcccatacacaagttccgagtggagtcacgacagctacccgagccttcatatccttaccgaagtcggctttcaacgtaatttctccataagaaaccgtaggatagacttggaacgaatcgagacttacacggtttattccactgggagtttcgtcggaaagtatcatcgacaattccaattcatcgtcacaacccgatgctccggtagctttcaccgtaaaactgcaaattcccggttcgttggattctgccggagtcccggaaatcaatccttcgggcgacaaagaaaggccgaccggcaacgagcctccggtaagagcgcaggtaataccttcaccttctatttcgagttggagcgaatagggataacctatgtatgcatcgggacactgatcggtaacgatgaatacatcgcaaccttctcccgatttaataaccaacgtgtattctttttgaatagaagaaacgtcatcggaaattttgacggtgaacgtataagaaccgttcttcgtcggtgtaccggcaaaagcaccgtctttacttaacgtaataccgtcgggaagcgcgccagaaacgatttcgaacttcactgcaccctctacattatccacaacgatattgctgtaataaggctcattggctacacccggctccaacgttttggtctttaccattaaggtataggaatatagaaccgtataaatatcataatcccgtacaaacggaagagtgagcgaagccccgtcaaaaacggtggcgccattattaaaatatccggttacatacaccttattgtaatcgggagacatcgttacacaccaagcgacttcgtgctgattggcattatcgggcgtaaccgttttttccagttgcataagttcccatgtagaaccgttatatttagcgacataaccgtcatgacctttgaacgtataatctttggattctccccgaggattcatattcacggcagttcctcctttcgagccgtcgccgttcacattaccggcgacataaatattgtcgtctgcatcgacaaatagagatttagcttcatcacgaccgctcccaccgagattcataccgtccaaataggctccggcagacgagtatttaatcaaaaacgaatcgaaattcccgttaaatccaagaggagactgtccttcgggagtaaccgccgactgacaatgtccccaaatataaacatttccttgtgagtcggagtctatcgaacgggtatcgatacgattggaattcgttacatacgtaatccattgtcccacaccttcgtgagacaatttagccacataggtgtcttgcgaagattccgagcccacggcagtcgtcagcgcttccccgtcggtcccggtgattgtgaacgtcgttccgaaacgtccggtaagcagtatattctcttctttatcgaaattcacggcccagccataggattgaacggggcttgaaccggcaatagcccactggcagaccaaagaattattatagcaagccaagaatgttcccgaattacttccctcgattgtcacggttttctcatttccgaaatcggtcgctccgacagtcgatcccgtcacaaaaatattgtcgctcttgtccacagccaccgaatagcacaaagatgctcccgccgcttttatctgagccgacgatttataattaccgtccttatcataaacgacgatacacccgtcggtagattgcgtaccgctcaacgtctggtccgtaccgtcgatagtaacatcacccgatattttaccgacagcgacaatatcgcccgcagaggtaactgcaatgcgttcgaaagtatcgtctttactgccacccacggctcttgcccacaaaaaattaagttcggcatcatatttcacgataacggcatccataccgccacgacctttaatcgtagctccatcggcaaactccacatctccacggcacatacccgaaatataataatttccgtctttatccgtcagagagctgtaaggctcatcggctcctgtactaccgaaagaaacacctgtttcaaacttagcgtctttcgctaccgcatctccaatacaaaataaagagagcagcaagattcctgcacttgtgtaaatttttcttagtttcatagcttaatgtttttaatagaaattaattagacgacgattaaaattaatttttgaatattataacatgatacacttttatctacatcgttatttgacaaattcgagggtaaccataatgggataatggtcggacaactggttatcggaaaagactttcgtttcttttaccacccacccattggccggatagtaaccgatatgatcgaactcccgactgagagccaacgtccatacgctggacaattcgttaatctcggcagttcctacccgacggttcatgtccccggctacaatataatgttttcccaactgcggaatacggttaacttctttaatttgcgacatgccgttgtccaatttagacatatcgatgtgagtgtcgacaatcgaaaactcggtcccgtcggggagctttatatcggcaatggcggcattacgttgctctgtaccggccgcacatggcaacataattctacgagtctcgtcaaaactgtgtttactcaaaatagcgttaccgaatttaccgccgtagcatttttcgagagttacataaaacattccatgcatgcctgttaaataggccaactcattcaacatattgatattgttattgatcggcctcggcgtattcgcccctgttcgattcgtatagtattctacttcctgcaaagccacgatatcgggatcttgttccttaatgaaagcagcgatgtcggcgataggggcatcataacctgcatggatattaaacgagattattttcagttgagtctgggcaaacacgcctccacacaaacatattcctaacagtatcgatataatttttttcatgattcattctatttattatttattcaaagaatattcttttgccaacacatcgtaaatgatggtcgctattactctgtttccttccaatccggggtggactccatcaagaaacaaatctccatacccccgcaaagccgtatgcaaatctatgaccgtgagattctgagcttcggcaacccgctgaatagccggaataatttcgctcgttatgataccgtcgtctattccgaacgagttgctatacgctatggccggcgtacacaaaaagaccctcggacgagttgacagactccgtaaggaaaggaccaaatccgtgagatcggactcaaattcggagccatgactagaccaattgcccgactttgaatcattcgagcccaattttacaatgacaatattgggtaagaatgctttggcattggtatattctttggtattccaatatggagaattgccattcttcaaaagagttgtgccactacacccaaagttggcgacctcgaaaccctctcccaacatattacccaacaaagccgggtagcactctttttccctatcgtttaaaaactgtctcgccccataggttatactgttccctatgcaagctaccttcctaaccgactcaatgccagcaggtctttgtcccttcggatagtcttcttcgttttcagaacaaccggtaaagagccctgtgaggagaaatagcatacatattccccagccggatactctgccgaaataattatactttttcatctgctctttattttaatcctatacgcaagaatagagccttatgatccgaaacggtttgatctcccttaatctgaaccgcctgtgttccccaattctgagacaaaggagtcaacacataatcgaatctcgattcgggttgaacggcaggatatgtattttccgaagagaacttgcaggaacggcgatacttcttcttcaaaatattgaatacattccccgattcattttcatagacagaagcacaaataacgatgttttgctttacttggtcggcataagcggcaagagcttcggcctgacgcacccgtttattggcatcttccttatcgaactggcatgtagcgataagaaccgtctcgcccgaacccaattcataaggaacagtaagcaataccaattcatcgttcaaattcactttattcgtaccataaaaacattcccggacaaacaaagccactcctgtttctccgccatcttcccgaccggtagaggcgaatatcccctgccggcgttgaccgtccttgctacaacggtaagcgacctcgccaaccagattcttttttcccgtgcgggcagtcccaaaatccacatcttgcaatgctacgacatcggtattattttcctgaataaatgccgctaacggctggatattatacgtcccagatgccaaccctttaccggcactcaacgacagaagagaaaacgaacggtcgccagccaacgtgaccagagtttcatcgtcaccgccggtcccgcccgaacccggcaaatccgggtcggacgaaccgcaagcagttatcgataaaattccaacgaagcacaaaatgaatttaaaatgagttttcatatatagataacattaattgtgaaagctatccttattcccaaccgggattattagggagcaaattgggattgcgttgcgtttgtgtgaacggaatcggccataaataatttttcatatcagagaaagtacgccccgtcatcaaaatcaaattccctttatcatcggtaggaatatcttcgacataaacatattcactgggcggaaccgtactcttacgcataccggttacatctttcgccaacaaatctccttgtttccaacgtaacaaatcgaaatagcgctccccttcgagagccagttcgacccgacgttcccgacgaatttcgtctctcagattcagcccgtaagcattcaatttggtcaataccatcttgtctgctccaacccggtctctaagaaggtttatcgacttatctatatccggttgagttattgcatcgcccctcatctccttcgcttcgatccagttcaataagacctcggcgtaacgcatcaacggaatggcgttctggtctttgttataacgagagattgcggagagttcgacaaatttcgtaaaataccaacctgtcgtcgtgcggcaactggtagccgaattcgagaacttaggctgttcataggtagtcttaccgggatatccgccccacttcgctccgggtttcaaaatcgtctgcgccatacgtggatcccgattattgaagatagcttcgtgggtattctcgcggtaacggctcgccggcaaagttatgggaagcccattacacaaataggcatccatgagcgaacgagtgggcgcataacgagcctcctcgttgggaacttgcaattcccggctgaggttatgagtttgattggcttcctcactatacagacgagtaacgataaactcccggttgttcttattagtcaccggattggcagccaaagtaaacaactcgttataagtcgtttcgggattcccgttatcgtacaatttatgaaaaccggcagtcattacctcttctgccgaagaaacagccttgtcccaacgctcgtggtacaacgcaaaccgagaactaaacgcccaagcagcctcttttgtgggacgaccgagttcgctatctttcaaatccttagcataaggcaataccacagctgcccggtcaaactcatcaagaatccactcgatcatggtttccttatcggtacgggagccataaagttcatcgtctcccacatctatcgtattggttacacggggtacatcgccaaagcaattcaccagataactgtacaaataggctcttatgaaaatggcttctccggcatatctttctcttacagatgcagaaaccttttgagcacgttcgtaattttcaagaaagtgattacaacgtctgataccgtcataatcggtcgtccactccgaattgataaccgacaaatcactcgtaaaatttccactcccgagagtcttgtattccgacgaacgttcacgaaaaacattatctcccaaaaattccatatcgacactcctgctttttcctctcaaataattgacgcaggcattagatgccaatatcaaatgttcctcggtttcccaatatgtttcatcggtaagttcgtccaacgggattctgtcgaggaacgaatcgttgcagccgggtaaaacaaacgccgcacacagcagaattgctaaatattttgttttcatatattctgacatttatatcgataattatttgaatgtaatgctcaaacccaaagaatacgaggccgtgataggatagtaacctccactgcttacaggaatctcagggtcatacgacgagaagaagtcggtgaacgtccacaaattttcgcccgaaaaatatattctcaaattctcaatatgcatcttggaaatgatccctttacggggaaccgtgtaacccacttgcaaattttttacccgcaggtatgaagcgtcttcgagccagaaagaagaaaattcgtcccgattgtatgtttcatcatacgtaaaacgtggataggatgcatgagggttttggttttcccaagtccaacgatcgagatgtgccttctgcggatagttggcaagctcggtaaacgcatgtcgtcccatgcctccgatatacccgtcacatttacccacaccttgtaaaaagaggctgaaatcgattcctcgccaagcggcgttgagtccgatcgtataattatatcgggggatagcactgcctatatagcaacgatcctcggtaggcgtaatcttcccgtcaccgtctatatccacatattttatatctcccggttgtaccttcgtgcgatactcctcgataataggggtcgtcgctttcggcgtataagtgttcgtggcaatatcataatcaaaatcatcgaccgtataaagtccgtcggatttgtatccccaaaatgcatcgataggatagcccaccgcacgaatgcgatcgccgctgaaatcgtcggccgtatttcccacgctaaccactttatttttcacatcggaaaaagtgacattcaccccgtaggtaaaatctttccctattttatcttgccaagccaaagcgatttcccaacctttgttttgaaccttaccggcattctgatagggttcactcacacccagcacatcgggaagtttcactttcagcaaaatatcgtcggtattcttaatgaagtaatcggccgtcaacgacaaacgattattcaacaaattgacgtccaatccgatattagtcatctttatggactcccaagagagaatattgttcgatgcctcgctttgctgcatggaagaggttatctccccgccgataggcatgttggaggtagaaggttgaatcaaagccatataaggatataacgaagaggtatattggttacccagagtaccgtatgaggccctaattttcaaattatccaaccagctgcgggtcgattccataaacgactcttcggtcaaacgccaagccaccgatgccgaagggaaatagcctccccggtgatctttatgaaaacgcgacgacaagtcgtaacgcaaattggcctctaccaaatagcgatcgttgaaattataattgacccgcccgaacccggaacgaatcgcccaatgattgtcatagccgctattggtttgcaaatcggttccggcattcagcacatggagatcgttggagaccaaatcctgacgactggcatccatttgttggtacaactgccactcctgagaaaagccggcaagaatatggaaagaatgtttccctatcgtcttatcataatcgacctgtgccatcacattctggtatcgttgggcaatatcgcgttgactgaacttactcgtattcgacgtataagccaatggcgtttcggtatcgggataaaagtgctgtatgatgttctgttgttgtttccgcaacacatcgaccaaccgggtagcatattgaacctttgccgtcaacccgtcgataattctcaatccggcactgaaattcaacgaggtctcacgtttatggtaattgataaaaccaccgtcgtaggcttgtgctatcgggtttgccgagctaccgccatatccccattgcccgtcggtgaatttcacgggagtcaaaggagaagaacggagagcttgatagaaaagtcccgaattttcgctatcgctcgatgcaggagtccaattatccacgtcggtataactcacatttccctcgatggtcaatcgatcgaaaagctcggtgtttaatttcattctcacattattacgggtagcatgataaccgttgcctaccataagccccgaagtggttaagtttccataggacaaataataccccatgttcttattcccaccgttgatatttacattgtgaccgtgttgaggagcataatctctcgtgatttcttttatccagttcgtattcgcccgaaaattcggatcggttccgttaatgacggcatcgatatcttcctgtgtatacccccaacttttatttacattcgaagtcgcctctttcagtaaagtgagatattcgacggcatcgagcatttcgggaagagccgtcggtttttgcatggcaaaatatccggtgtaagtgaccgtaggttttacctcgcggtcggccttacgcgtcgtaataagaataactccgttggccgctctcgaaccatagatagaagaggaagcggcatccttcaataccgatacagactctatatcgtcggggttcaacgtgttcatgtcgccttccacgccgtcgataaggatcaacgggtcggagttattcaatgtcccgatacctctcacccgtatagaagagttattatcaccgggacggctcgtcgtattaacgatagagacacccggcaacatgccttgcaaaccggtcgtcacattagcgataggacgattggctaaaacatcatggtctaccgaaacgaccgatcccgttaaatttattttcttttgaacaccgtagcctaccaccactacctcgtccatcaaattggaatcttcgttcaatcgaatttcaatgggattttcattcgtgacaggaacctctgtctttttatagccgatagaagacacgaccagcagagcgttatccgaaatattattgatagtaaaatttccatctacatcggtcgaagttcctatcgaagaaccttttacgataatactggccccgataatggcctcgcctttttcatcgactaccttaccggaaacagaacgggaccgtttagccgcttgctgctgtttggaaagcaaaacaactacattatcgactttcctttggaatgtgatattcgttcccttcaataactgtttcatggtctcttccaaagatgcattgtcggttttcaccgtcacgagtttatcaagcccctctaactccacattataaaagaagctataattgctcgaccgttcgattgtttttatggcttctttcaacggcttatttttaatatctaccgtaatctgcgcctgaatattgagcgtaaaaagcgcaaacaacaagcatagccacctcatcttaaaatggtttgatttcatacgtttttcatttttatttctttgattaaaaagatattagtataaaaggtatctgcaataatgtgttacttttaattttcatcgtctattgggtatacaagtagcgacccagatttatccaagcctattttacaattaacatttattaaattatctaattcttaaatgattcgacatgtgccattttcataagcaaaaaggggagccggctcgacgcaaacaccaagcattcttatccccatagggaaatattcaaaagaggagctgttatattattttttatgaagcatgatgacagaatcgcgcacttcataatgtaatgacgatgtcatcgacaagatatcgagagcatttgtaatgcctccgcttcctatcgaaccggtgaaaaaatattgtccttcgggaaacgccgagtcgaaaacgatttttacgttatatacacgagataaaaccttaacgatgttttccagcgattcattttcgaaacgtaaatttccatcggtccattcgacatattccttcgaataaaccttaccgacctgcatggttcccgtgtttctgtcatacaccagtttctcgtcgggctgcatgacatagcgatcgctctccgacgccacatcgactttcccggtcaacaaaacgaccgacacctcgctatcgtctttataagcacacacgtcgaaagccgtacccaatactgtaatttcaagaccggcagcctttacgacaaacgggcgctccttatcgggagtcacctcgaaataggcttccccatcgagctcgacgattcttctttccccattaaaatcatgcggataactaatttgagaggctgaatttatatttactttcgtaccatcgggcaattggactttggctcgttccccactctcggcagttactaccaacgggagagtatccacctttgaatcgagccccaactcatatacggccaacgcagcgataatcggtaaacatacaacggcgacccaccgcaacatcggaacaaaggagaatcgtctatgcgactttttctcccgggattctatgtcctctttaatgcgggtatacagacgttcatagacttcctcatcgagatgagaatcgcttctttcaatagcttgcataatccatcggtcgagcgagtcgttattttttatccactcgcacaattccctgacttctgctgtcgaagcgtttccatcgaggtacttctcgatgagtattttgaaatattccttatccatttgttcctttacctagtataaaagcaaatcggctcgcacgtctaatcgtttatagttaaactatcttaattaaagcggcataaatcactaagggtaacaactcatcgtaatgggccatcaatttatccctcataaatttaagcgccaacgacaattgcgtcgcgacagtactctccgaaatattcagctcgaccgctatttctttattcgtaaaatgcttacgtttactcaaaacaaatattttcttacgcgacggcggcagttcctcggcaagtcgatcgatatattcttccagcaacttaccgtccagctctccatcggcattatcgctatattcttccgaagattcaagaacatattccgcataaatatattcgacagtctgccgctgatacacgttcatcaacagattcttagctatggtacaaagataagaaatcaacgatttatcgggactcacctgatcgtgtatctcccacaaccggacaaacgtacgttgtacgatttcctccgcccaataactgtctccgccagatattctcatgacaaagttgtataatttaccactatacaacttgtataccttttcaaaggcatcgaaagaacccgatttgaggcctacgataatattgtcacattcacttttcaactctggcaataataatataatatgcaaatgtaaaccatctgcctaaaaatattattatttacatgttatttttccaataaatatctatttcgccaatggaaataataatattattctttatttaatctgaaattaatagcccaaaagacgcctaagcgcattttccgcctcatacgacgccttaaaattgggttgaatgactattctgttgtttctatcgatcgcgccccagcggtttctcccgacttccacaacggcaaagccctcgtcgttgaatcctcgtgcattgtaatattgcggtttaatgaaccaatttccataataatcgagataaccgtacaatccactcttggaatcgcgggtctcccataaatcgattccgcgcaatctacccttctccatcgaagtaatagcgttatccacatcgtagctgtgctcgaacactggatttatcaccactttcccagccatatttatggctccgtaccgcacaccgatttgcacccgcgccagtccgttgttacggaaacgttgtgcagatctgaatttaggctgtattacccacatacccaagtcattgacatagccatataatccggtagccggactttcgaccggtgtcaaacgactagccgcctgcgaaccataacttcccgaatacagaggaaaccctcctaaaccggcacaggaacaaacaaaaaacatggaaataaacaagaatatcgagatcgggtatttcatgagatttgaattttaaggttttatcatacaaactcttttccaacataaaagcgtatatcttcgccccttttttacaacatcacaaatataaaaacaaattttaaaaaaccaaaccttcggaacagagagaaagggataaaacaagattcctattcaaaaaagaaaggcggaattaacattccgcccaacgtcttatccattattctttcacaatagacagcttcccaccgggagcacccagcacatcgcctataatcttattatccttgattttcgcacgacggcattttaccaatgttacggcagcctttcgtttgtggaacggtttataggttgtattcctttgaatcacattccctgtaaacgaaataccgtctacgctttttgcatacaaaataggatagtcgaacggattgaacgtattgttctcaatcctgatattgctatggaacggatacttcgtatcgggctggggaatttccggctcgatagatatgatggcttcacaaaactgatacatggaagacatacagggataacggaagtcgtttcctttaataagcacatcttttaccgcacccgattcgtaccaataattcgcatcgcccgcaatcaatatagccgacccgctcgactcgaacacattgttttcaatcactacttttcccggtgtggaaaccagtaatccccgcgcccggcaagaaccgaaaaacgagttgcgaatatcgacatcgggagtccacgtgagattctccaatgcagcgcctaccccgatttcttccggcaaatccgatgtcaattccaattcgaactcatactcgtctatcgccttgaacgagcgtatatttgcagtagcaaccgtgcgcatggtgttgttttcgatcataccgactttatctcccggaaatccccactccatacctttgctcatgtcgtgcataaaccggcagacaaccttatcagaagaaaggactttcaccacccggacacaggttccatgtatgtttatgggatcgtccatcaaaccggcccaacgacaactgtcgaccgtaattttacctttacaccccatcaaatgaaaaccgtcgtcgtgaccgctcaatatgcgtcccttcgccgcattgggctctacactcacttttttgaacgcaatatcagaagaatattgtgccaagatacccaagccggcggtatgatacacctgcacatcggacaaccgcacatcgtggctgccacagataaaaattccggcatggtctctcgtgctatgcctcaacaccaaccagttaccctcggccgggtatcgttcgaatcctcccttccgactcaaccgcacaataccataccgaggtgaaacggccgtataatcgccccaattccaccccagcaccaaatcacccgtaccgggaactacgaaatgcgtatcagactcaaattctatcatactgcctaatgcacttttccaaccttcacccacgaacaccaacttgccgtcttcaatgatatagggagattcgaggacattgatttcgatctcgaaaaaatcgctacccacctttgtcacacgagcctgagccgtaagcggtatatcccaatcgatagagaaatttttcaaggtaacgccatcgcaattctcaacggttatcggttgtattcgatcgtgcatgacgaactgcgagccgttcccgtcgacagtgatattgtgaagcccctcgaaaagcattgccaatcgcttcggaaaaacatcgtaggtattggtctcataataatttttctcatgagcatattgaggccaaaaatcataacgtccttcgggaaagacaagggttaccggctcttttcccctacaagcctctatcgctttttgaacatatgccacggcattctccctcgtatcgggtttcaacccaaagtcggctaccgaaatcacagtatccgcatatcctttacttccaaaaaaaatcgatgctatgccgactacacttacccatacgcgtgtcgaaaattttgttcccattcttaatcttgttaaatatttcaattttgcaaatttataactattttgcaaattctaaaccttttaatttctcccatgctcctcgcgtgaaatcgggaatacgtacaggaacagatccatttcttactgaatattcagtcaattcgaccaagcaagaccattcggcagcatcataaacatcttgatccaaaggcaatccattccttaaacaataaatcaagcgatagtccataataaagtccatacctccatgcccacctacttttcgagctaaatttccaatttctttcacaaactgatgttcataagccttcaagagagaatccaatttctcttccggtaagaaacgatgagcattcggttctaaggcaatcccttccaccggatatttctgtgcaaaaccctttgttccgccgattacatgatgccggtcataaggtcgaggacttgtcacatcgtgttgaatcaaaatcgttttccctttttcagtcttaataagagtagtattcatatctcctaaatcatattttttagaagcgaacgcatgctcttcccccaaacgactccgagaatattccgtcaatccgaactggtcactcgacatcgacaccaaataattcattttatctccccgatgaatgttcattatttgacaaatcgggcctaagccatgcgtcggatatggattccccgtatgatccgtattatatttcaatctccacatatcccaatatcccgataccgatgcagtgtcaaaattatattctcttaaatcgtgaatataagccccttctccatgaacaatttctccgaaaacgccctgttgagccatattcaaagtagccaactcaaaaaaatcgtagcaacagttttccaacatcatacaatgtttccgagttttttcggcggtattcaccaattgccaacactcgtcaaccgtaagggctgccggaacttccaccgcgacatgtttcccctgctccatagcatagaccgcaataggagtatgcaactgccaatgggtacaattataaatcaaatctacatcgcttcgttcacaaaccttcttccaactatcggggccacaatattccacggccggtcctcgtcccttcgcagccagaatcctctgcgctttggcaaccttgaaagaatctacatcgcacaacgcaaccacccttacaccttctatattcataaaacgtttcacggctgccatgccccgaggacctacccctataaaagcaacccgtaccgtatccaaaggttcggctcttaatgcaaggacatcggtttgtcccgattctctttccggttcgggaaacgggtcggctttataaacagacttacaagcaaacaaaagcaacaatgctcctgttataataattcttagaatcagattcataactaatactttatttaatcaaagattttgaatatttacggtcgtcgaaaacatatccccaaaccgggaagtcacccttattttaagttgattatacggaatagaaggcctacaatagaacatatgatcagattcagaggcttgtatccaagtacgcccgacagggaaagtattatctcccttcgccccgaaagcattgtatgcagtaatatcatacatattcagactacggaacatcgaacgatagttttgtccgttatcttcggaatattcgactttccacgaaggatcccaatcccaaacattcagaacgacatttttcgggcgtaatatgttgattctttctcccaaaggatatactctcatctggtattgttcgggttgtcccacacatttatatttccatttaaatgaggttccgtccacatcaaatattttatacccgataggtgtaccctcactacaaatcagttcgggttgccaccaattaccgcacattgccgctacaatgtgttctgtcataccactaccatcatctgtcacaacagagttccaatgcgtatgaccgctaagaatctgaacatcggcatatccacggagaagggcatacaactgttctctgttgccgaaagaccgagtctcggttctgcgcttagtaggtgcatgtaaacaaaggacaatcgccttatctttatcaacatacatcaaatctttttgcaaccaagcaatttgttcatcggaaacggcatcgacatacttaggccccgatccgccccaatattccacatcatcaaggactacgtaatggaccttaccccgattatatgaataataagtaggcccgtaatgtcgtttatacaccgtatcagccttcaaatcattggacttcacagcaggttcacttttgtcgaacacatgatcatgattgccgataacattatacacaggagcattcaacatcgaaaaaatctctttactcgattcatgatactctggtttgtcaaacaccaaatctcccaacacaatataatgtacacattctcctttacggctctgcgttacccagctgttaaggtcatttacagcttctttcaaataactcaactcaaaatcacgatataactgtggatcaccgattgcaataaatgtatgtttcgtatcatctttttcaagacgaacaagctcaaaatctttatggacaatatctgttcgctgattgatttcggcataaaactggggtacgctatttttcacgcatacggtataaccgctcggtgaagatatatatacatgagaagccgtcgtatttcgtttcattctatatatacctttctcatcagtaacagtgacgttagttccatcggtcactacaacccccggcattcctacccgattgcaatgcacccaacctttaagcgtaatacccggcatatccaagataattccattttcaggatcgtccttctgctctacaatagtatcgggctcttcgggatcgacgatatccgtggaatcggcaggttcttcctctcttggtttttcgggttcgggcatatcgtttttttcacaacccaacaagaaaataccggcaaaagccagacatacgaaatagataagtttcttcatgctaatttctcctcttttgtttcaaaactatggggctatccagattggttggatagccccataggaactttattgaaccataaatctctgcgaataagatacacccattccccgaacggtaactacataccattgagaaggcatattatttacagaaatactttttaccatgttttcttctaccctaacttcctctttatagacttgttttcctgataggtctgcaatttctatcacataatttcccgaaacaaggtctttcaaagaaactttaagcattccatcggttaccggattgggatatacgacaaagccttcggacacaagggtttctatcccgctttcgcctataacattgagatataccaattgagtgacacgacagccagcttcgtcctcggcgacaatcgtaaacgaatattccttcgccggagcattaggagttccactaattaatccgacaccatcttccaacgagcttatagacaagccataagggagagagctaccttcttcaatagaccatgttactgctccggtagcattatcggcatatattctcgcagaaaaaggttttccattttctgcatcttccgaaataatcgcctctactgtcatctgacaatccgctccggtaacagaaatgctgaattctttactagcattgacaaaaccgtcagtagccaagactgtaaatttaaatattccagcttcattcaatactccactaatctctcccgtattcgtatccaaagacagtccatcggggaggttatctccatctttaagactataagcaacttgtaagggcttttggaaaccagaaatattcaattgagccgaatagctctccccttttattccctgaggaaaaacgccgaacaaagcagcatcttggctataacgcgccaacataaagcgtccgcctccaaaagcattggaactaccgctaacaccatagggatatatcgttccgtaagtaggcccggtcaatataatgtcgttcgtagtcttatctatcgaaatggccaaaccggtcggtttcacggcatcggtaataatagctcctgtcgagaaagcatataaatactctccttcatcggaatatttggcgacaaaggccgttcgattatttccattgcgctgtaattttatactctcatatacaggcaactctgcctcataatatcccacggcatagacattattactttcatcaaccgcaagagaggtcactccgtcatcggcaaccgatgcaaacatgcgatgccatacatattgtccatcggaattaaatttaataattgctccatcggttttcgaagcatcggcctcaatcgtttccgttgttcccgatatggaagaagaccctttacaaattgcagcaaaatacaaatttccatttttatctcgaacaagagatgttccccgtccattgataagcgaaccattgcttcccaacgaagttacccattggcaaactccggcctcgtcatacttggcaataaacgaagtaattccggtagctgtcaccaccttaccattaccaaaaggtactgtaccgttattcaccatacccgatacatatacattgcaagcgtcatcggtcacaaggccatatatttcctcacctttatttaccgtacctaaacgcttcgcccaaaggccttctccatctccattcagtttaataatcaccacatctaccgaggttcccgctaatgtttcggaagagccatcggccataggtatcactatatctccatcgttggtataaccgatcacataaatatttcctttcttatcaaaagtcgtattgattccggcttcccaatctttggccgagccaaatactttatgccaaattttgttaccatctttatcaaaacgaataactcctatatcccgtcccccatttgtaggaaagctatctgtttcatttagggttcctatacgagcatcgggcgtaattattccggtaaatactccatcgcctgtcactacatctgttacaatcgcctgtccttgctcatttctgccggatacaggagagcccccgatcgtacgagcccacatgaaactaccatcgattccattatatttagcgaccaatgcatcggtattcccaatgttcgggaatgaaacttcatcggagaaagttgccgaaaaataacttgctgctacccaaacatttccatctttatcgatagaattcactttggcatggtcaaacgcttcacttccataaatttgattaatccatttcagattcggagccaaagaataattaaattcttcggcattaatcgtatagcttcgggaagtctcacaaccactctcttctctcgctttaatcgtgaacgaaagttcccctgtttgttgtaaaataccgttcaataatcctttatcaggatccaaagacagacctttgggcaaattttcggcagtccaaacaatttttccctctccattttccaacgtgaattgttgatagaaagctccggtcacagcccgtgaaggtagactctcgggttgtatagacaagatatcgcagggtttaggtacaatagaataggtataggttttctctacactttcaccgtctgtggcattagaaatcatcacactgaatgaaccgctcgcttcttcggtagcttttcccgaaataatacccgtagcaggatccaatatccagccagagggtaaattgccagccaaagagtattcaaacactgccggcatttcgaagaaagccggaacaatttgatacgagaaaggaacgaatctctttccgttcaacgtcgagattcccgaaacagaaggtttcatcgtataggatgccgcaaaccatttataattacgatctccgacagtatatcgagcgacgccagtttcagagtcgccataaggcaacgtgacatctgtcgttctatccccggcaacagccagcttatctccgtttaccgctataagattgatactctccgcacctgttcctttgaccgtttcggcatacagacatttaccggaaccatttaatttagcgaagaagccctctttttcattagacccggtcttttgaagaacgatattgtcaccccaatttaacgaaccgttgaaatatccgcttacataaatattccccaaatcatcactcgaaatctctttaccttcgctcgatgtatctcccgaagccgatttgctccacaggagctttccatcaacgtcaaaagagataacaaataaatgatctgctcccgatacatgcgtgacggtttcggtagacaatccggcagatccttccacgattatctgattattcgctttccccgttacggccacagcattcgagcccgaaacggcctgtaccttcaacacttcttgatttccagtaccggtaaaataacgggaccacatcacagaaccatcggtcgaattgagttttaccaatgccgactctttggactgctcgggataaagcagatatttctgttctccaatataaaactctcgtttttcctccgactcattcattagatttccattcgcagcattgaaaacaccacaaatgacaggattcccatcttctcctacggttacatcaggagttccattttcacgaaatttagaaccgatactggtcgcccataaaatttcaccgtctttattgaacttcacaagtagataatcttcgccccaattgtttgtaacggccaaagaagtagaagaaccgtctttgagaggcatttccaaaggtgcactcgatacattgccaaaagtagccacggcatacaagttcccggcctcatcggcaaccaccgaattgaacatctcccaattacgaacgccaccgaatgtctttgcccacacagcctcaccggtagcagcattcagtttagcgatataataatccatttccccctgtgagaccaatggaattccaaacacggataccgggtgttccccctttacattggttctgacacctccgactacatagagataatcaccgacttcacaaaccgatgtcacctgactattattggcagactcctgcacacacaccatattgctccaaaggagttttccatcagccgatattttcgtcaaaataccagcacgggtagtagactcttgatagggatttttaatttcatcgaaagttccgtcatctttcattatctgaaaagaattggcattgatcgatatatacatatccccattcttcgttacggccaaagccttttgttcatcggccgtatgatcggctcccaaactttttccaacaataagttgtccaaatacagccataggggacaacaataatgcacagcagaccccaaaaagctgtttcttactaaaaatagcatttgttttcatagtttatcatttttattttttactgaaaaaagaaagtgtttcgcataattaacattcaatgaatcaagcctcttcgattgaatagtcaaacggtagataaaatctgtaaaatctttttgttcttgccgactccacccaacttcggccaacgctatggccctcggataagccatatattcggcatgctcgggagtagcaatgtattccgtccaaagatttccctgaatgcctaaaatatatcgaccctgttccgatgttaatttttcggtaggattataggaataaaccgaatctaacggtaggtaaccataaatagccaaaggctcattatcccggtcttccgattgataataatcgagatagcaaaaatcccgaggagtcatgataacagaatggttcatttttgccgcttttatacctcctgcttctcccctccaagacatgacaacggcattaggcgcgatgccaccttctaaaatttcgtcccagccaataatttgccggtcatgtgcattgacaaactcctccattcgttttataaaatagctttggagttcatgctcatctttcaatcccaatcgttttatatttcgttgacaaaccggacattcggaccaacggtctttcggacattcatctcctcctatatgtatatatttcgaaggaaaaatttcaaaaacttcggatagcacatcttccagaagtttaaaactgccttcctttgtacataggacttctttatgaacgccccaatcgcacgagacttcgtagtttttatgaaaacaggccaactgaggatatgcggccaaaatcgattgagtatgtcccggcatttcgatttcaggaataacctcaataaatctctcgtgggcatattcgacaatttcccgcaattcatcttgggtataatatccgccatgaggttttccatcgtatctacgaggtacatcatttttatgtccggcaatactttgtttgcgccaagcccccacagaagtaagccgcggatgcgattttatctcgatgcgccacccttgatcatcggttaaatgcagatgcaatacattcaatttatacaacgtcattatatcgatgtttttcttgataaaatccaacgggaaataatgacgtgccacatcaagcataaaccctcgatgtttgaaacgaggttcatcgtagatattcacgcagggcacttgcagtatcacattttcgtcacatatttttttctcgcattcggccggaagcaattgacgcaatgtttgcactgcataaaaagcaccagcaccacccttcgaggcgatagttattgtacgaggggacacatcgagtctataagcctcatcatgagcgatcgtatcgcaaacggtaaaaacgattttattccgggcttcttcaccggttcctatctgagctttgcaacttcctgtctgttccacaaaggttttaagaaagtttgccgctctttttatttcttcatcatctgttttcaattcaattaccacactgtctccaaacgtaaattcgcccggttgcatgtctaccgataatggtttgggtataagggggcaattatcatttaatttatcggtttgtcctttacaagagactaaaacggataaaaacaagataaaacaatatcgtattgttcgtatattttgcataattcctatcgttatttactgaattctttctctaataatacttttccatcaatttgcttaacttgaactttcagcagatcttccgaaccaaacattgtcaacacagagttattggagttcactattatagggaaagctgtaactttccccttatccataaatccgaatgcgtgattatgcccacttaacatcaaatcgatacgaacactctccaatagggggagcaactgtttgcgtagtcgttcagagccataccaactgcctttcccaaaaggaatatgagacaagactacccgaaaagaggcagctctaaactccggactttccaattcacgggccaaccactccttttgttcaagtatataattatcaaaatctaccaaacccgaatattccacatctgtatcgggtttatcttcaccgctatctaacacgatgaaccgaatggggccataggtgaaagcgtaatagaacttcccttcgggaccggcaaggtatcggaagaaattacgggcatatgctccacgagtttcatgattaccccttacatatacaaatggttttctagatgcgaacaggccgaccgatgtatctaaaaaaccggtgaaaatatcactttgcttgttaatatagttacacatatccccacaaaacactaccatatcgacattttgcggtggagccatttccaacaattttttctgcaaatcgttcttcccatgtatatcgtttatcataactatcgacaatgtttcctgtctgccatcgagtgttgtaaaagtcaacggttttttccagatatcggtagaaacgatgttacccaaaacaggacgatagggcagcaactcttttacctcttgtgacaatactcggtaaaaataggtcgtgtttttttcaagccccgtaatcgttacgcgatgcaatgtgtcgacacaacacaacccgtcttgtgaggcataggcttttcgcggcagttgggagtagaagttcttaccgtcttcctttttgctgaattccacccacgatttacaaggcttatcggttgtccacacgactgtcacttcgttctccgacaagttttgtaaatagggaccgtgggtaatttttaccgaaggttgcccggctatggcatagagcgggaatactattcctataatccaaactcttattagtttcctgagcatatttatttgtttaatgcatgaattctacttataaggcccgatccctcggtctctcaacacatcgagaccgggcctttccaaatctatctaaaaagtgtgtctgtatattcgaccgcctaccaccccggattttggactaaattcggattgatatttatatctctggaatccagcggatagagatagtgttgtggcacattaaaagttttcgtcggctcattactgtttcgcaatgtcagataattttctgctgactgcggagattgggtcgtaaatcctgccggaaaacaattccatcttttctgaaccttattgaaagtcagatgcgcaattttccaacgacgagcatcgaagaatcgatggccttcatacatgagttcaatcgttctttcctgtcgtataatctcgcgatagtctttccctgcaattccctgccaagaagtctcgacatcggggataccggcatgggaacgaatatcattcaaataaatgagggcctgcccatcaagtcttccataatattcataataagcctccacataattgagatagagctctgtcaaacgaaccaacggaaaagccgtagccctcactgccacctgattattggcgaaactcgtattcggatgtaaatattttttccataaataaccattgggagtgatattgtctttcaagggatcgttcccgttcgtctgattggtttcaggattaatttcgcccattctcaaatacaacgtataaccttttcctccttttattccatctctgccgtccaattcgaaattggttgcccggtcgtatgcaatatcggcatagaaacgaggttcccggttcaaatgcaatctcacggtcttttctcccgtctcaggatcggtcgttattccaaatcttctatcatattggaaagacgggtctttatcaatgggcaatccattctttgttaaataggtttccaccatttgcattgaaggagccaagcccccataaggaacagtggtagatccttgtgacaatccgcgaggtgctatcatttgttgaatattcattcgggatcctgtgtaagcccaaataatatctgtatttcccgcactcggcatagtcaccaacgaccaacgatgattaaaatatcctttttcagcatcgcttattccaaccggagcctgcaaatgggtatacaaatcatgtccggctgcatgcgcttcattgatagcgtcctcggctgcatctaaggcttttttccatttttccttatcatactgcaaactgattaattgttctccatctttattcttaaagtcgctgtaatattcactattcccattaaacaaaggacttgcggcatacaataacatacgcgattttattcctcttgccgcagcccgcgtgggagctccatatttatcggaagtttggataggcggcagtaaaggagccacttcgtctaaacgatcggcgatccattctacacactcatcgtaaggacgacgtttcgggaaggccaactcaccggtagcatccaatggaatttccctgtctatcaacacaatcggaccatacaatcttaacaacagataatggtaataagctatcagaaatttggcttgcgatgaaaaatcggttatttctgctgcggatattcccggtacactttctactcgattcaaaaatgtatagcattgacgaatagcgccataaagattgtacgctttgcaacgactcgattgtgtaggacttttgaaataagaccaataattatatatgggatcggctgccgtttgagacccaatattcgcgactttggagtaatgccatgtcgtagcccactgagaagttatgcacacctcatcactggctccattaaattgcggctccccgttatggtcactcgactcgggcataaaagaataacaagcgtacaaaaaattcctcgccgaatttacgctggcaaaagcctcttccaaagttcctttcttctctggttcagaatccagataatcacaaccggaaacagtaacgagtatccctaatactaagaatatatttttaattgctttcataatcgttttagaaattaaattgaacacccagattgaaaactctctgtaaaggatataccaatccattgccactgttagatccgcctccgatctcaggatcccaatacttaaagcccgtaaatgtcaataaattactaccggcaatataggctctcataaatttgtaggaatatcctatctcagcatttttcaatcttaggaaagaaccatctctcaaccagaacgtcgacttctggtatgtattcgtattatctacattgtgcgccaatctcggatacttcgcattaggattgggattagatgccgaccaatagtcatctgccacaaatttcaaaacattcttatgatagatatcgaacggatgtatatcgtccaaataaatagagacttttcccgcaccctggaagaatacagagaagtcccaattcttatattggaaagaggctccgaaaccatatacaatctgtgggatataaggatttccgatataggtacggtcatactcgttaaccaccccatcttcattcaaatcctgatattttatatcccccggttttatgttaggcataatagcctcttgactgggactatttttaatatcttcctcatctttaaataaccccagcgctatataagccggcccgatacgattcaaggctccgcctctttcgtattgataactaaacggataatggggctcatctttctccaatattttatttacagcataagtaaagttccctttaaccgaaagaacaatatctttggaaaacgcatgattatattccaaagacatatcaactcctctattcgtcacttttcccacattggctaccggattagcatcaccaattcctatcgtaggcgaaatagtttgccgagtcattaaaatcttgtccctattttcatgaaagtaatcggcaatcaacaagaatttttgatcgaacaaacccaattctatacccacatttgcttttttagcaacctcccaagtagcattttcattaccgtatgtcgttatgatagctccggcctcggtagctttgaaatcctcaccgaaagcatatccagctccattcatattgacattggtatatccgggaaaacgaacagaagaattagaatttccaaccgttccatacgatcctcttaatttcagcagactaatcgtcttattcaaaggggcaaaaaagtcctcgttcgaaataatataaccgagtgcataggaagggaagaagccaaaccgcttacctttggcgaaattgtcactcccattatatccgaaattaaactcaaagaaataacgtttatcaaagtcatacgtaaatcttccggccataccttgattcaactctccgagagaagagttataattggccggattactactataaacccctcgttgcaaataaatcagttgcgctgaaatatcatgaagatcggcaaactttctttgataatctaatgaaacattaaaattgaataacctatcacccgaataggctttggtaaaagaaaacgcatcggttccatcgttattgacatttctcaacttccaagattgattccccgtaataggatcggtaacaatcgtgttcgggtcgatttcgaaataatagggagtataagtacgattcaaagtcgtagaagagaaatgcttcatagagaataaacctttaacagacaatcccttagtaataaacttcaaatcttggtctatattaaacgtcgccatcgtcgtaatgcggaacatttcctttataccggaagccagttcggcatacggattcggataacggttgagttgggcgccacccgatttattaccccatgcaatataattcgtaccctcgatttgaggaaatttcaccgggaaataggtaggctgtgcccacattacccgattaaagatcgtattgatactattataagggcccttgtaatcttgtatttgaacatttaatttcacccccattttggtagtggacgaaatatgagtatttacattggcttgaaacgaataccgcaaattctgaatattattctttaacggattttcttttgcttcttgtaccaaccccatatcgttattaaatgtcgcactgacaaaataatccatatttttcgacccaccggagacgtttatgttcgcagcctgattaaacgtgacatctttaaaaataatatcataccaatcgttattgggataaaggtaaggattgcggttctcaatagttccttgaatctgatcgtcggtaaactgaggattcgctccgggagtacgagcttcgatcgcttcattaaacattttcatataagtgacaccatcggccagttcgggaatctgtgtaggcatggacattcgcccttcgacacgaacatttatcgtaggtttttgattcattcgacccgacttggtcgtaaccaaaagaacgccgttcgccccacgcgaaccataaagagccgttgccgtagcatctttcaagacagaaaaactctcgattgtttccggtgctaaggcattcaaatcatacgtgctggattctgttccatcaattaatatcaaggcattctgagctgaacccgaagcgaatgtactgactcctcgtatccaaaaattcgcaccatcggctcccggctccccggttttctgaaccgatattacgccggcaatacgaccggcaaacgtgttagtaaggttggtagtgggcacacgaagttcactggcttttaccgattgaatagcaccgatcacactctcttttttctgtttaccgaaacccacgacaacgacttcgtcaagagatgtattattttcctgtaaaaccacagtcacattttttttcgtgccataactcacctcctgcggttgaaacccaatataagacaccaacagaactcctttgtcggggacttcgatggaaaaatttccttctatatcggtcgcctttcccgatttctcgccttttacaatcacattagctccgataacggcttctcccttactatcgataaccgtacccgtaagcaggcgcttatcgaccttcgaagaagcatttgaccggcttttactgagaactatctgctttccgtttatagaatacgtaatatcgctccctttaaacaaaatatccagaattacggagataggttgatctttctgcgatatatcgatcctctgaccgacatctacttgctgtttattgtacaaaaaagagtaactggttgtttcctctatataattcaaaacgctttcgagagtagcatttttcatattgacgcttaccaatggatcgcgtgtatgattatctgcaccgaaagccataacattacagcaaaccaacaaaagcgagcaaatttttataattagaagattcttaggcagaaattgttgcttcccacctttcaaaatagaaataaagttcatacatttgtgttagtttagttggtatttaaggataataaactctaagtgttatctttccgctaacttatgaagggtggatatggaggaaggttccacccttctttatatggcggataattctttctattctatctaatccgtctttctcttcataatataaaatttttaaggttattcataattattttctataatctcactacttcgatatatctcttggaataaacgccattaggcatagctttctcggaagttttttctatgtatttcatgggaacagtcaatttcattaaccgtagaatctcatcgagcgtttctccctgaaaggtcgcacgatacatatgtttcgccaaatctttgtccatcaccacaatatcggcattgtaaacttgtcctatctttcggaatacatcgtccaaaggttcatctctaaaaattaatttgccatctttccatgcacaccatttataagtatcgacctcttctacacgataattttgccgtttcgtattataatttattctttgtcccggtttcaaattcaaccgttctttactcctatccaactcaacctctacaacgccattaaccatggtcacagcatttatcgtatcattgctataaccttctacattaaaagccgtacctgtggctttaacttccatgtcctcggtatatacaatgaaaggatttttcttatcggaacggacttcgaaaaaggcttctccattcaagtaaacgctacgctctccggccttaaatttcgtaggatatttcaattcaccaccagaattcaaccatacgatagaaccatcaggcaaattcatttgtatacgagttccataaggagccgatattttctgataacttattttagaataatcttgttctacaaacctatcggcaaccatatatatcaaggcaaacaaaataggaataattaaaactgcggcaactctactccaataacgatatatgcgtatcacacgtttttctcgtaaacccatcttcaactttatccgacttaaagccttagtcgtcgaaatagaccgtacatcaaaagcaggatgcgtcacctcccacaaatttttcatttttaagaagtaatcataattatcttggttattcgaaatccacgtttcaagcacacgcttatcctgtaattccaaattaccagatagatatcttacaataagacggtcaatattctcgttcgataattccatttttatccctttctattaataagacgtttatcccaaaaaaatccacaatgaaaacagaatttttttatctatcgtacaaataaaacagcaatcaataagaaaaaatctttcaaaagagtccgcaatgtttttaatgactggcttatacgaacttcaaccgtacgttccgagacattcagttttttagcgatttctttatattttataccttttatccggctcaatacgaagacctctttttgagctttcggcaatttatttatcgctttttttatatgatcttgtaattcggaatataaaatatattcctcggtattggagctcgataataccgagttttcatttacgtaatcaaaataatcgttcctgacattttgatgcctcatgtaatcgaaacaacggttccgaacggaaattaacagataagattttaacgatctccccacagacagtgttttccggtcataccataaatgcatgaataaggattgaactatatcctcacaaacttgtctttcgcgaagatagctccccgcataaagaagaaggtccttataatacaatttaaaaatagaatcaaaagatctttcatcgtccaaagctaatctccgcatcaaatcatcgtcacatgcttgttgaaaagtttcgtcattcgagatcaatgattccgataaaatatttaaatcatatatttctttgtgattcatagtcttataacttaacttctaaaaatgaatattcaaaaccgataataccaaaagttattcagatacaactttttattttaaattaggtgatgaatttctttcctcaaagatataataatattataaaactaatcaccaattaaaaaaatcttaatgaaaaattcttataaaaaattacagttatccccacaattacagttaattataataaattaaattggagaaatatcacaattatttaatattataattagtccatttaagaatataagggttcagtagaaaattcatggggataaccctgaatgttagcgaatgagaggggattgtatctactcttctcctctgccgtgtaccgtagccttacaggacgttgtgacgcaatatagagaagagataccgaagaaacaatagtttctgaggagaagggttgaaaagatttcataagatttttagctgtaagggttaatccccttgtctcataggcattctccctatattcccttatgaaaacggaaacacctcgtaatgctacggagcacggcagaggaggaggagaaacttgattattttcactgcgggtattttctaacccctccgtcacttcgtgacacctcccctatattttgcattgcaaaacacagaggaggaggtttaatgcccttctatcacactatttatcaatgagatggatcgtgttcggcctcctcctctgccgtgctccgttgcattacggggtgtggcgttagccatatataggaggtgtcacgaagtgacggaggagttgagaagatattatataatttttgattgaggagttagaagtataaaacgggcaatccccattaattatcgacagagcctaaaaatctactggctcaatataagattttttctatcgggacaaacaaaaaagcagattgcgattttctcgcaacctgctttatgtggtcccacttgggcttgaaccaaggaccccctgattatgagtcagatgctctaaccaactgagctataggaccggcacggatatttccgtaagcgtgtgcaaagatagatgttttcaaagaaaccccaaaatatttttttatttttcttcaaagggaatataaaagacggttgaaatcaccccttctctatcgtaccccaatatacctcgcctttccatgaaacagcataaacaaaaattgtacaagcatttctcctctgctcaatacggttgtaccatcgaccgtcatgcttccgtcaactaagaagctgttttaaatttattgagaaataatattatcattgcaggcaggtatgttccggccctattgagcccctgtctcgcatcttgaatcccttgatttttgtcaatagcccgctattgactgcgtatctcggactccaatctgcttcaacataggtcttaatctgtctcggaataaatttaaaacagcttctaaaaatttttctatgcagccagaataccgcacaaaattcactacttttgcataaaatgcgagaataggtaacacccgaatgtaatcaagcaaatttattttaccctcggttcgccctattttcgctgcacttaaaactgtatttatgaatacgtctttggcgggtatccggaatttattattcgatttaggtggagttattataaatctcgaccggcaacgttgtgtcgatgctttaacggcactaggcgatgaaaaagccgacgaaatgctggacctatccgtccaacggggaacactcatggatttggaagagggaaaaatatccccaagcgactttttcaagcgcatgcgccaaaagatagggaaagccgtctcggacgaggaaatcgtccatgcccttaacgaacttttaatcgggattcccctcgaccgtttgactctattacggaaattgagacagcgattcaacgttatgatgttgagcaacacgaatcctatcatgttcgataccaaaatagccgagtgctttgcacaagagggattatcgattaccgattatttcgacgacgtttatttatcctaccgattaaaatcttgtaaaccagacatcgctattttcaaaaaagtgatcgaactatcccgtattgttccgcaagagactttatttttcgatgattctcaaaagaatttagatgctgcggccagcctcggattcaagacttttctcgtaacacccgacagggatatagtaacatttttcaatacccaatcgatagatgacttctgaatataaaggtatcacaaacgatcaagccgcttttgcagcactcggtgtattcgacggtgtacatacggggcatcgagccgttatcgaaaaagtaaaagaagaagcggctatgagaaacttatcgtcggcagtcatctcatttcgcacacacccgcagcaggtacttcaccccgaaataccttttcgcatgctgacatcgcccgaagaacgagccgagctgttgcgaaaaaccgggatagatcgaactatttttcttgacttcacacccgaaatgtccttattatcggcgtacgatttcttgaaaatcctgtcaaaccgatactgtataaaagggcttatcatcggctatgaccatcgtttcgggcataaccgggccgagggtttcgaagagtacgtcaaatatggcaaggacttagggatagaaataatccatgcccctgaatttgtgaccgacctcgggccggtaagctcttcgattatccgaaaatatcttttgcaaggcgatgtttgcaccgccaaccgattactttcatatccttatacgttgcacgggaatgtggtaaaaggttttcaggtcggaaggaaaataggatttcccacggctaatttaaatatcgactacccggacaaactgattcctgcaaatggagtttatgccgtacgaatcgggataccagacggcaaacattacggaggcatgcttaatataggacatcggccgacactaaaccgcccgaacgattatagcatagaggtgaatatttttgatttctcggaagatttatacggcaagaccttatctgtcgaacttatcgaatatgtacgcacggagaaaacattcgccgatataaaggccttacagtcacaattagttaaagataaagaaactatccgcaaaatcttatccgagtaatttcctcactcacttccggcgattcgcaacgcagagaataaattcaaatttattccaacctttatctattttatctcgaaacccgaaatcgctataacgagacttgataatcttgtttattcagtttaggatcacaacacactaaaccgacattcttcatatcgacagttaccctcacacgctcatctttaacgagcttttcccaccacgatttcacttcgctattactgcggataccatctattatcaacaacgcatgcatatccaaaacaggggcaagcaaatcgggcaatgcccgataatacggcttgggcaaacgattcacgacaatatacagacgttcgggtgtttgtcgaaaatagtccaagagaaacgtagcatattcttcccgaacgaaatcggccttctctccaacctcggcaaaaaggctctcggcaaaatcatgaacctcgggcagcggttctacaaccgtaatctcagattgtcttcccgccaatctcaaatagagagtcgaaattccccatgaagttcctatttcgagaatgttatccggacgaaagaagttggtcaatcgaaaaaaaagccttcctcggcttgtcgaaatccgcttccgcaaatgtttctgtcgatgcgaaagactatcgtccacatgctcgtgacaaatcgcctctatgtcatcataggcatagtacctcgctttctcccgtatgaccttcgtaataagtctaaacgcaaaaggagaatggataccgaatccccatgcttgacgcatgcgactcatcggcgacgtataatccttccagaactttttttgcatgacggtattcctaatcttccacagacaaatcgttacgctttttccacgctccaagccccaccactacaaatgctcccaagataaggaacaaagaaacataggcaaccgcttcggtcgtatgaaccgattgcgggtcgaaacggaaaatgacttcgtggtctccggcgggaagatttaccgcccgcagcacataattcaccctcgccatatcgaccggtttcccatcgactgtcacttgccagccccacgggaaatatatctctgagaaaacagccaatccaccatttcgggattggtaacgataagtcaactcgtctggtttgtatgccgtctcataaatcgtgtcaccagcaaccggaggaatgattttctcaccgatttcattcttgaatttacgatcggccaccgccgtaaacgacggatcgaaatcggtaatcgcctccatctcggcatcggcattatcaacccatttcacttccgagacgaaccatgcgttccccaaagctccgggattgcgtaccaccgtctcttttccgttttcgagaggttggataatataacgggtgttcaacatattcaataccgcaggattggcattctccaactgatgctttatcaagtcttgataacgacgcaacttggcggcatggtatcctcccaccgatttatgataatacgaagtacgaggctcgttgaaacttgcctccaaagttggtcccgcagcagcattcaatactctgtaattcatatctttgtcttgcaagatataacgatcggcctcggtcatggggaaaggattggttttccgggcagcagtcacgaagttaccgctattgagataacgtttattgaccggatacatatcgccgataagaattacgaccaacgcaaccattgccacagtcgaacccaacttcttctccctcaaaagccacaaagcgacaaagcccaatgcaacaataacgaacgaacgccatgcatcggccgtaaatatagctcgtcgagcctcggctatcccggcgaataactctccataaccgggttgctgtatagcctccaattcataatctttcaagaaatcatcgaacaaaccggggaacaaggccgccaataaggtaatcccccccactataccgccactcaaatagaacgaccatttttctcttttaagaatcgagggatcgtcgaatatctttttcaatgccaacacagcgagcagaggcatacaaaactcggcaacgaccaaaatactcgaaacggtacggaaccggttatacatggggaaataatcgataaaccagtcggtaaaccacatcatattcttcccccatgacagcataacggtcaatatagttactgcgagcaatgcccatttcaacggagtacgaacgataaaacaccccaatacgaacaaaaagaaaatcaacgcacccacgtaaacgggcccggacgtgaaaggctggtcaccccagtatcggtcgacctgagacaaataaggacggatttgaggatcggcagccttcgtcgcatgctcgttctcggaaagcagtccactggcccctcccttactgtcgggaataagcaaggtaagcgtctccatcttgccataactccattgagtaatataatccttatccaatccgctgcccgtattttcttgggaattgtcttgcgatgtcagctcggtatgtccacctcgcatggattccttcgaatacttataggtatgatacagattcgaggcattcgctccgacagccaataaagcggcgacaaccaatactccggtggctttgaaaaagcgaggcaacgtatgcgaacgataatgttctaccgcataggcaattactacggcaaagataacaaacaaaaaataataggacatttgcacatggttcgacatgatttgcaatgccccgaacagagcagccaatgctccacccaacagatatttaccccgataggccagcacgataccggcgatcgtcggcgggatataagccaaagtaataaacttccaaatgtgccccgccgcgataataatgaaaaaataggaagaaaacgcataggctatcgccccaaaggctgccagataccaacggacattcagcgacaacataaggatataaaagcccaacatcatgataaacagcaaagacaccggcgaaaccagccacaagttgtagatcttttgcaatcctttcaacggttcattgctcgcatagctcggagctatttggaacgtgggcataccggagaataccgtacccgtccaacgaggcatttctccggtctcttcggcatacgttttcgcctcatgcccgatagctaaaccttgttgggtgtcatgttgaaacaatattttcccttcgattacatcgggacaaaaataaacgaacgataataatacaaacaccaataccggcaataatgcccaaaaattcctatggtttttcatttctccaaatctgtatattctgtgcaaatgtacgagtttaaccgaaataatcccacttcaagaagaacaatctgaaacaaaaacgtttatcttctattcctttattaatagagccggagctgcactgggcaactccggctctattaataaagacttatcttctatcttatttcacaagcgaagcgatatcgaattttgcaaattcaagatcggtagcagcttgttgggctttcgaagaatccatgctgatagatttcttcaagttggaaacaaccatttgttcgttgttggtacgagcacccaaaacagccatcaaatagtatgtattggcattaggagcttcaacaccggccaaagtagcttttgctttgctgtaatctttcgtcaagatttgagccaaagcagcattgttggatttaacatcgccgaatgctttaacagctgcgttatagtcgcctttcttcatgtagaatacacccaatgcttcgttcaattcttctacaccagcagatttaccaaatgcttgttctgccttagcatagtcgttattagccaagctgatcaagccttgattcatagcaacttcgggagtattaggagcaatgcgggcagcttttgcaaagttgttttgagcagcagccaaatcgccttcttcgtattgaaccatacccaagttgttgtatccgcgataatcattaggatagatttcaacgacttttgcataaatagcggctttttctttattggtctttaccaaagtagcagcataaagtaattcgtcaacagaaagagctttggcatcttccttagccaatttcgaaatttcttcgtcagatttaccgataacgtttacagaagctgtgattctcgaataacgcaattggggaagaatttcttcggccaatactttgaacacagaagacatgttcttaatttcacgttcgcgttgttcaggatcggaatacattgaaagaacattcaaaataagttctttgtcttggatattcgatttcgaaaccaattctttgaaaccttcccagtcttgagctgtaaattcggcagtcatatcggcatcgattttacctttcttcaagctcttcttcatatagttaaccgtatttttctcacggttttcggccaaagtcgtattcaacttaacaccaccatcgggagaagcgtaagaagcgacattgatattggtcaattccttattaggagcttcggtagcagctttgatttcattgtgcaaagcgttcatttgttccgatttcaattgctcagaacgcaagttggcttgttgaataaggaacataatgtcggcagaatatttttcttctatgatacgttggaacttatcgggcgtaatagcaggattcaactcttgtgcgttagcgatctcggccgtagaaataacgccttctgcaacagttacacgaggaaggtcatacgtttttttgcctctttgtaccttaaatgccaattgcaattccgatttccgcatagcaggaatgtatttgaaattaaccggcattgaaacaacaccacccattttataagaaatggcttggtcgttaccttctactttttcaccttgataaacaaacggagttccggcagtttcaccatcggcataaaccaaatacggagttacggttacaaccgatttcttatcgaaatatttttcagggaaagttccagtaaccgttgcaggaacttgaccgcccactacttcaagaggagaaggggttaccgtaaaataatcggccgataacggcttcatgtctttgttacaccctacaaatgccagtgtcatgagaagcattagaggaagatagattttcttaatcataataataattgtttggttacacttattttttgaaatattacttttatagtcaactgtttaaaaacaaaatactcctattgcggttaatatttaaggcaaaaataaacaaaaatagaacactcccactatttttatacaaatttttttatctaaccttcataatttataaggttttcttatttctggggtggtgttgcaatatctcttgtcgtaaaaactgccggtcgagatgagtatatatttctgtcgtagtgatactttcatggcccaacatctgttgtattgcccgtaaattggctcctccttccaacagatgggtagcaaatgtatgccgcaacgtgtgcggactgactttcttacgaatgccacatctttcacaagccctcttgataatatagaagatcattactctggtgagttgtgtcccccggcgattcagaaacaaaatattctcgttgccccgctttatatcgagggatagccgatcatctatataaggacgaatttctttaatcgctttctctgaaataggaaccaacctctgctttttacccttaccttccacgatgatataaccgtcgttaaaatagaggttggacatacgaagccccaccaattcggaaacacgaaggccacaactatacaatgtttctacaatcgctcgattgcggcgttcttccggtttcgacaggtcgaacgaattgactagctcgtccacctcctctactgtcaacacgtcgggcaatttcatacccaatttaggagtctctatcaattccgaaggattcgtatcgatgcatttctccattctcaaaaaattgaaaaaagattttatccccgaaataatacgagcctgcgaccgtgcaccgatacccaaatcttgtaatgtagcgacaaactgatgcaaatcggctcctgtaacggttctccaatccaaattttccgagtcgataaagtcaaccagcttttctacatcggacatataaccggctatcgtattctccgaaagccctcgttccagtctcaaataacgactaaaacgttttaacaaattatccgtatcaactaatgccattttctttttatccgatatctcattttttttctgtaattttgcactaaattcaggagtagttttttgagcttttatacaaaacaaagctacgctaatggcagactattccgtatcttgatgaaaataggcaaaatcgaagagaatacgaaacatgtatttctccttacaaagatagtgatttatggatattcttattattaacgggccgaatcttaaccttttggggaagagagaaaaaagcatttacggagaaaaaagtttcgaagattatctctgtgaattgcagcaacgttatgcccaacaccacattgcatactatcaatccaacatagagggcgaactcatcggaaaaattcaagaagccggtttttcctgcgacggcattgtccttaacgccggtgcatacacacacacgtctattgcaatcggcgatgccatacgagcagtacccgcccccgttatagaggtgcacatttccaatatacatgccagggaagagtatcgacacacatcaatgatagccgccgcagcgaaggggtcgatcatcggattcggactcgactcataccggctcgccatagaagctctaactgaaaacgaacgataaattaatcatatatgtccaaatataccaaaatagtagccaccatttccgacgctcgttgcgacgtcaattttatcaagcagctatacgaaagcggcatgaatgtggtgcgtatgaattcggcccatttgcaagaagaaggatttcaaaaaatcatcgacaacgtgcgtgccgtttcgaacaaaatagccattttaatggatacaaaaggacccgaagtgcgtactaccgcattgtcgggggattcaaacattttgttttcgacgggcgacatcgttcgcatcacgggaaaagaaggaacattgaccggcaacggatatatcggggtgagttatccccgttttgcagaggacctttccataggcagccacatacttatcgatgacggagagctcgaatttgtcgtgcgaaaaaaagagaacgacgatttgctgtgcgaatcactcaacaacggagaactgggtgcacgcaaaagcgtaaacgtcccgggagtacggattaacctaccttctctcacggaaaaagacattcgcaatatccactatgccattaaacaaaatatcgacttcatcgctcactcgttcgtacgcagcaaacaagatgttctcgatatacaggctatcctcgacgagtacaaaagccccatcaagattatcgccaagatagagaatcaagagggtgtggataatatcgacgagatactcgaagccgcctatggggtaatggtcgcgcgaggcgatttgggaatagaagttccccaagaaaaaatccccggcatacaggctcgactgattaaaaaatgtatacaggccaagaaaccggtaatcgtagcgacacaaatgttgcactcgatgataaaaaatccccgacctacccgtgccgaagttaccgacatagccaatgccatttatcaacataccgacgcgcttatgctcagcggtgaaacggcttatgggaaataccctgtcgaagcggtggcgactatggcccgtgtagccgaagaggccgaaaacaacaaactcacggaaaacaacattcgggtagtttcgaccgacgaccccgatgtcacttcgttccttgccaaacaagccgtaaaaacgtttaacaaattgggcacgaaagctatcgttaccgacagctacacagggcgaaccgctcgttatgtcgctgcctttcgcggcagatacccggtattggcgatttgctattacgagcggacaatacggttactggccctctcatacggcgtctttccgttatatcaggaacgaacccgtacttcccgcgaatatttgttcaacgggctaaaccatctcatggaacaacacctgataaaccgagacgatttaatcgcctatctgggcggcggattcggtgaaggaaaaggaacgacgttcttagaaatcaatcgagtgggagaagttctcgataacttcgaccactatacgctacccaacatggaagataccgaagcatgacgcccgaactggaagaatacatattgacccacatcgacaaggaagacgagctgctcgcttctctcgacagaaacacccatctctaccacttgcgcccgcgcatggtatcgggtcatctgcaagggaggattctcaaaatgttctgccgcatgatccggccgcacagaatattggaactgggaaccttcaccggatattcggccttgtgcttggccgaaggactgaccgagggcggcgaagtacacaccatagagatcgacgacgagatagaagatttcacccgcagttatttcgataaatccccgctacgcgaccggataaaattgattataggcgatgcttcggacatcattccgacactaaccgacacgtatgacatcgtgtttatcgatgccaacaaaagggattacttgaaatattacgagctcgtattgccgaaggtgcgaccggaaggattcattcttgccgacaataccctatgggacgggaaagtcgtaaccgacccgaacagccgcgatgcccaaaccataggaatagaacggttcaacgacttcgtcgcgaccgacaatcgggtagaaaaaattatacttcccttacgagacggactcacgatcttatggaaaaaaccataatttcgccggatatacgaggtaaaactttgttatttattaaaaccacctattatggaaacaaccagacaaaacaaaataagccgactgctccaaaaagaattgagcgacatattcttggcagaaacccgtaaaacacatgggataatcatatcggtaagcgtagtgcgggtaagtcccgacctgagtacggcaaaagcctacctgagtattttcccgccggaaaagagcgcagaaatgatagaaaacatcaatgccaatacgaaaaccattcggtacgagctttcacagcgggtacgttaccagttgagaaagactcccgaactgtcgtttttccttgacgattcgctcgactacatcgaaaacatagattctctactgaaaaagtaaacgctccctatgaaccgcctcgcccggaaaatagcatggcgttacttgttttcaaaaaaatcgcatagcgccatcaatgccatatcgattgtctcggtatgcggggtggctatcactacgttggctctcgtctgcacgctatcggtctacaacggatttacggagctgataggatcgctctactcccaaatagacccgcagataaaaataactccgttgcaaggcaaaactcttgacaccgaagaagagactatcgagcaaatcgccgaatggaacgaagtgaaaacattcacacccgtcatcgaagaaaacgccctctgtatatacaaagaccggcaacggcctgttttagtgaaaggcgtacccgacaattatacagagctttcccacatacaagacattgtcacgagcggaacgttccaactcaacgacggcagaatcgactacgtatcattaggtatcggcgtagctggacaactcggcgttgtcgccaactccccttatccggtagaattgtacgctcccaatcggttgggaaaagtcaatctgaccaatccgtcacagtcgttcaacgggagacgtattttcgtctcatcgacattctgcgccaaccaagccatctatgacgaccagctcgccatcatacccttgtcgacggctcgcgagatgttcagttacactaccgaagcgaccgctatcgagctacgcctcactccaacgacaaatgaaaacgaatttgcgaaaaaattgagagagcacctcggtgacgcttatcgggtagcgacccacatacaacaaaacgactggtacaaatgggtgcaaatagagaaatggatcacatttcttattttatcgttcattctgatgattgccacattcaacgtaatcggagccttgtcgatgcttattatcgacaaaaaacgggatatagatacactacaaaacctcggagccgacgacagactcatttctaaaatcttccttgtcgaagggtggctcatttcggctatcggggctggttcgggactcatcttgggagtcatactctgctatctgcaacaagaatacggaatactgaaattgggcagttccgaaggcgtgtttattaccgacgcctatccggtaaagctggaactcctcgacacgctggcagtcacagccatcgtcctcattctgggattcgtgaccgcttggtatccggccaaatttctgagaaaaagacttctgacagccaaacaaaacgaacaataacctaccacgctccgtcattgcatgtcacccgccctatctcatcttatgatgaccgacggaagattcattaaaaccaatgcctacgctttttaagggcactgagaatcattccatttcccgagcgatagcttcggcaatagcttgcatctcggtagattcaagagaaagtttgtcccggaaaaaattcatatccgcttccttgttaataggaacgaggtgaatatgggtatgcgggacttcgagtcccataacagcgactcccactcgcttacaaggaatcgctttctcgatagccttcgccacccgtttggcaaatcgggtaagacccacataagtctcatcgtccaaatcgaaaatataatcgacctcttgtttgggaataaccaaagtatgacctttggcaacgggactgatgtctaaaaaagcaaagtagttttcatcttcggctactttatagcacggtatttcaccggcaacgatacgactgaaaatagatgccataatttcgtgattttaggtctacaaatatagtgaaagttgagtgcaaagacaaaaggaaatcatatttccgactcggctatgccgaatcgtatcccataaatatagcgaaaatcaaacacaaaaaagctaagctcgctgagacttttcgacaagacactctatattaatgtgaaaagaaacagggtgacaaaaaatattccccctttctgcgaactataggagagaaagggggaatatctataataaaaaagccggtgtgcataactcgcacatcggcttatgcctaaatagaaatatctacgatctcgaacgacatcaatccagaaggcacttgaatctctgcgatgtctccgactttcttgcccaacagtcctttggcgataggcgtcgtggccgagatttttccttctctcaaattggcttcggactcagatacgatggtgtaggtcattaccgcaccgttcttcacatttttaatttttaccgtattcaaaatctgaaccgtatgggtgttcaatttactctcgtcgataaagcgtgcattcgccactaaatctttcaactgagaaattttcatttcgagcattccttgcgcctctttggcggcatcatactcggcattttccgagagatctcctttatcacgtgcctcaccgatagcccgtgagatttcgggacgcttcacattttcgagataagcgatctcttccatcaattttttgtaaccttcttcggtcatgtacgtaatagccataatctaactcctatagtttatattaaataattttctcatcgagatgtcgtttcaatttttcgaaggttccaatatcacttggaaatttcaaaacggctcctaaacaaaaaagaaatcccgccgtttgtcgggactcctttttgtgctttcaatgtgacaaagatactctcttttttttatcttccaaaaaaaaacaacgatattcgtccaaaagttcatttttcgagtctcgtaccgaaccttaaagccgagactgtaccgcgttttctatttcatcgactttttctatccgttttacaataccgtcattcctatcgataacaaagcatgtaggcaatgtcttcacattatacatggcggcattatgcgaataaacgctttgaggatctcgcacacaaatccacgggagattatcggccgcaactttccaagcctgctcgtcggcatccaaagaaacttgatatatttccaaccctttcgacttgtattttttatagagctcggccaacttcatattatacaccggagaataatcggcctgataggcggtaaaactcagaagaacgactttaccagcatcgacaaaatcggacaagacctttttccgtcctcgcaaatcgtataattctatatccagaaaattggctgtgctcgcttcgatttcgggcttttccttttgcgcagcacgctcagcggcaatagcagccagtgtcatgttcttcaattgtttggatcgaggcgaatcgggataaagcgaatcgaatcccgtagcgacggcagctatcaattttcggtcatcggcatcataaggatcaaatattttatctccgtttatttcttgaaaaacaatataatatgcagttgccgaggccggattttccaataccaaatcgaacattttctttttataggcggccaaatcttcgattgcctgcttccgcaaatcgtcgacacggtcgctattggaagacatggctcgggacagttcatcgattcgtttttttaacttggcgctttcctgagcgacaatgcgcatcttcacacattcgtccgaccctgtaagttcatagtcattggcaaaatcggccgcattcgccgagaggttcaatgtttcggtcgaatctatggccaaatgtatgatggacttgtccaatctcaattgataaaactcaggatactgcggagcatgatacttgaatttaaaccgaccgtccttatccaattcgacagaatcgagaagctctgtaccattcacagccaacgactctaaatacagtacttgtccatcggcatcggccacgcgtccctgaatggaaaatttcttattgtcgcacgaggttatcaccaacgccattgcacacccaaatacccactttttcatttccgtatatgttataaattatgttcctttcttcaattgcaaagatagtatacgccgagagtagaagcaaattcacttgattataccggggcataacctatttcgcactatgcaaagataatgcaaatgaagacagaagcaaaacacatttcaattacattgattttcactatcaatggcaaaaatagtgcaaatcgaaagtagaaacaagtttactcgacatataccgaggtacaggttactcccgcattcgccgtaaacggtcacataattgagaagctcgcgcaagcaaaatgtcaggagaaagtataaaaaaacgaaattaaaccgactcagactcctctctacgtattctattttcgcatttttatttcataatcatagttttactttcaaactttcattatctttgcacgattttgagaaggaaaaaataaagaaaaatcgattttatgattaaacaagttattaagaagaccatcgatttgggtgatggaaggaccatcaccatcgaaaccggcaagctagccaagcaagccgatggagccgtcgaggttcgcatgggcaacaccatgctgctggctaccgtatgttcggcccaagaagccggtgaaggcgtggatttcatgcctctgcaagtagaatataaagaacgtttctctgctttcggccgtttccccggaggtttcaccaaaagagaaggccgtgcttcggattacgaaatacttacttcccgtttagtggatcgtgtattgcgccccttgttccccgaaaattatcatgccgacacattcgtgaacatcatgttattttcgagcgacggcgtagatatgcccgacgctttggccggtcttgccgcttcggcagctttggccgtttcggatatacctttcaatggccctatctcggaagtacgagttgcccgtatcgatggtaaattcaagataaatcccactttcgccgaattggaaaaagccgatatggacttaatggtgggagccacttatgaaaatattatgatggtagaaggcgaaatggacgaagtttcggaggccgatttgctcgaagcattgaaagccgcccacgaagctatcaaggttcattgccttgtacaaaaagaattggcagaagccgtaggctctaccgtgaaaagagaatattgccacgagaccaacgatgaagagttgagaaaagacgtttgggcaaaatgctacgacaaagcatacgctatcgcacgttcgggaaatgccgacaagcatgcccgccaaaacgctttcgacgcgattgtcgacgaatacttagccggcatgagcgaagaagatgccgccgaaaaaggagctcttgtaaaacgctactaccacgatgtagaaaaagaagctgttcgccgttgtattctcgatgagggtattcgtttggacggacgtactaccacacaaattcgtcctatctggtgcgaagtcgattatatacccggacctcatggatcggcagtcttcactcgcggtgaaacgcaatctttatcgaccgtaactctcggaaccaaactcgacgagaaaattctcgacgacgtattgaatcaaggtcgcgaccgtttcttgttgcactataacttcccccccttctccactggtgaagccaaagctcaacgtggcgtaggtcgtcgtgaaataggacacggaaacttggcgaaccgtgcgcttaaacgtatgattcctgccgattatccttacgtggtacgtgtagtttcggatattctcgaatcaaacggttcctcctcgatggcaacggtttgtgccgggacattggctcttatggatgccggtgtgaaaatcaagaaaccggtatcgggcatagctatgggattgattaccgataaagacaatgtgaaatatgccattctctcggatattctcggtgacgaagaccacctcggggatatggacttcaaagtgaccggaactcgcgacggtatcacagcgacccaaatggatatcaagtgcgacggactttcttacgaagttttggaaaaagcattgaaccaagcccgcgaaggtcgtctgcacattcttaatattatcaccgacactatcgccgaacctcgcgccgacttgaaaccgcacgcgcctcgtatcgaaacgatgattatcccgaaagacatgatcggagccgtaataggcccgggcggaaaaattatccaaagcatacaggaagccagcggagctgtcgttactatcgatgaaatcaacaacgagggacacatagaaatatctgctgctaatctcgattctattaaagatgccatacgtcgtatcaaatccatcacggctcaacccgaagagggagaaacttataccggagtcgttaaatcgattttacccttcggcgctttcgtagaaattcttccgggaaaagacggattactccacatctcggaaatcagctgggatcgcctcgaatcgatggagacatcgggcatccacgaaggagacgaagtaacggtaaaactcatcgaaatagacaaaaaaaccggtaaataccgcttgtctatgaaggcgctattgccccgccccgaaagagctccccgcagcgaccgtcattctcgtaacgacaacaaccaataagaatcatttatttgccgcataaaagccgtgtatttcccatacacggctttttttattcgtaataagaacaagctcttccccctcatgtttcgcaaaagatatagcgaagaagcgttgaatcccccttaatactatggaaagcaaggctcaggaggaaattagtgaagattgtcttttaaattctctcttgtatttgcgaataggagtgaaaagaatattcgcagtgacatcttagttccccaccctcagctcatcgcagatgagatagggagaacgctcgtaaggcgagaggattaaatatccgatacaaacagtctaatgtgatgttgttttcaacccctccgtcacttcgtgccacctcccctatattttgtttgacaaccaaacacaggggaggaggttttaattaagcaagaatcaacctttcaccgaaaagtccggaatgtggttatctacaaaaatttcatcgctaaaattcatgtctatcccacgaggttttactgaaccgaaagcagcagagagtctcaccataaagtttcaaaaacaccggcaacaatcattccgaaagaatgtagctccaacttattcatatttctttcatttgtaaaatacccttgaaaaacagctctcgaatacaggctgaaaaaataaaaacagcttctaaaaattctcatttttttacttatttagagcaaaaatagctatcttcgtttgcaaatcactcacagcttatggcagcactgaaacagcagttgcaacaaaaattgcaacagaaactatcgccccagcagatacagttgattcgactcctcgaacttaccgaaatcgaatttgaagaacgcgtacaacaagaactggtcgataatcccgccttagaagaaggacgggaagaaatcccggacagtataaacgaatttgatgccaacgccgatgaagacggaaatccgggagaatcggcagaggaacttacattgggtgattatcgcaacgaagaagatataccggactaccgactcgaagccgacaactactcgaaagatgacaaaaaagaagacattccattcgtatcggcctcttcatttcacgattacctcgaaagccagttgggagagctttctctcgacgaaacctcctatcaaattgctcaatacattattgggaatatagatgacaacggttatttacagagaccgatacaagctatttcggacgatcttatttttcaagtaggtttagacgttccggtgagccaagtagaagatattttacaaatgattcaggagttcgaaccggccggtgtcggagcttcgaatttacgggaatgcctgctactccaattagagcgccacgaagggactcctgccaacttattggcttacaagatcatcgacaaaatgttcgaagaattctctaaaaagcattacgacaaaatcatgcgccaatgtaatgtttgcgaagaagaactgaaacaagccatacgagaaatcacgctacttaatcccaagcccggaagcgcatggaacaacagctattcgggcagctcggaacatcacattattcccgacttttttgtcgaagcgcaagatggggagttaaccatcgggctaaataacgggaatatacccgaactacacgtaagccgggattatcaggatatgttcgacgattattcctcgaacaaacaaaaccagactcgggaaaaacgggatgccctgttattcgtcaaacaaaaactcgatgcggcgcaatggtttgtcaatgctgtaaaacaacgacaggaaacactgctgagcacaattaaagtcatcgtagatttacaaaaagattttttcctcaccggcgacgaacgcaacttgaaacccatgattctgaaagatgtcgccgaacgtgcgggatatgacatttctaccatctcccgagccagcaacagcaaatacgtgcaaacaaatttcggcatttatccgttaaaatatttcttttccgaatctatgcaaaacgatgccggagaagaggtttctacccgggaaatcaaaagattgttggaagaactggtagaccacgaagacaaacataaacccctctcggacgataagctgtgcgagctgctgcaacaaaaaggctatccgatagcccggcgtacaatcgctaaatacagggaacaactatcgataccggtagcccgattgcgaaaagaaatttgaatgaatcaaaccgaacgacacatgaaactattagccacgattctatcgactatattccacccgttattgatgccaacttacggaatcgccatcgcactttatacgtcctatatgagagtcttcggcgacagactgttaggaatcatcgtcataggcgtattgctcaccacttgcatacttccgtccttaggcatatttatcctctacaaaacaggtcatatcagcgatttcagacttcacaaccgcaccgagcgtaccgttccgtatatcatcaacttcgtttgttatatcgcatgttatctctacttataccgtttcggaataccgaattggatactctctttcatagcgggtgcaatcgtctcgcttatcatttctttatttatcaaccgatattggaaaataagcgcacacatggtagcggccggagcgatggttgtattggtattcctaatgagcatttatagattaatgctcacgccctatatattccccttgcaaataaccatcattttgcttgcaggactcatcggctcttctcgtattttactgaatcgacacacgatcggccaagtaggtgcgggatttgcattaggagccatgtgctgcggatttttatttttcctattcatataaaaccaatcacagacaatttatatttattatgaaaccaatcgtaagtataattatgggcagtacgtccgaccttcctatcatggaaaaagccgccaagctgctcgacgagtgcgaaatcccgttcgaaatgttggccttatcggcacatcgtacccctgcggaagttgaggaattcgccaaaaatgctcgttccagaggaataaaagttatcattgccgccgcaggtatggccgcacacctgcccggtgttatcgcttcgatgactacactgcccgtgataggagttcccatcaaatcgggtatggaaggactcgatgccttgctcgccatcgtgcaaatgcctcccggaattcccgtagcgacggtaggagtcaacgcagccctcaacgcagctattctcgccactcagattttggcgctcggcgacgaaaccgtcgcttcgaaagtagaaaaatacaaaaccggacttacgaaaaaaatcgttgatgccaaccaagaactcgcatcgataaaatataaattcaagaccaattgattccatagtttcccttgtcatggactactataattaccaccgcaggaaaagcagtatcgtacagataggaaacacacctctcggaggtgaatatcccgtacgcatacaatcgatgaccaatacctccacgctggataccgcggccagtgtggaccaatgtatacgcatcattcaagcgggagccgactatgtgaggctcacggcacaaggagtgagggaagcggaaaatttaggcgaaatcaaaagagagttaattgccagaggctatacgacacctttggtcgccgatatccacttcaacccgaaagctgccgatgccgccgcctacaccgtagataaagtgcgtataaatccgggtaatttcgtcgatagtgcccgcactttcaaacaactgtcctatacagacgaagaatataccgccgaactgcaaaagctcaaagagaggttcattccatttctgaatatttgcaaagaacaacacacggcaatacgtttaggagtgaatcacggttctctgtcggaccgtatcatgagccgttatggagatacccccgaaggtatggtggagtcgtgtatggagtttttgagaatctgccgctcggaaaatttcgacaacgtggtaatctccatcaaagcatcaaatacggtagtcatggtacgaaccgttcggctacttatcgaaacgatggaatcggaaggtatgaattatccgcttcatttgggagtcaccgaagccggagacggtgaggacggaagaataaaatcggcggtaggtataggaacactgctggccgacgggataggcgataccataagagtgtcgttaagcgaggctcccgaagccgaaatcccggtagcttgcaagctggtgaattatattacggcaagaaccggccacaaaccgataacaacccccgacgtatcgctggaacaaatggcagcccgagagagagagagttgtaattgtatcggcggcaaccaacagcccgtagttatcgccgaaggagtgcctcaaacagggacacgcgccgatttctactacacacacgaccgaacagtcggcggcgatattcgatctatcgtagattttgcacactatcacggggaaaacgactcctatccgttatttcaaatgcacgaattatctgcattgaaatcgactccggcgactgtccgcttcctacaagccgatgcagccgacctgtcggaagaaattatcggcgagctgtcgcaggaatcgggaatagttcttattctctcctctcggcataccaacccggtaggagacctgcgggcggcattggcacggcttaccgcggcaaactgcaaacttccggtcgtattcatggtcgaatacgaagaaaaagagagcgaagacctgcaagtgaaagcaggggccgatttcgggccgtttctgctcgataatcttatcgatggcatattccttcgcaataatggaaatatctcgtcccagcgactcacagactatatgttcacgattttacaggccgcacgcaagcgattcagtaaaacagaatatatttcttgtccgagttgcggcagaaccatgttcgatttacaaactacaatcgcccgtgtcaaagcggcgacctcacaccttaccgggctaaaaatcggtatcatgggatgcattgtaaacgggccgggagagatggccgatgccgactacggatacataggagccgggcgcggcaaagtgagtttgtacaaaggtaaagagtgtatcgaaaagaacatacccgaagagatggctatcgaaaaactgatagctcttatcaaagcccacggcgattggatcgatccttcctaagtgccgactactccgaacatggaaaaccaaaacgatattcatagagaactgacttcacttccggtagggaaactgctttggaagtactctgttccggcaattgtcggtacaatggttatgtctctgtataatgtcatcgaccgcatttttatcggtcagggcgtaggagccgatgccatttcgggcttagctctgacctttcctatcatgtcgttggcaggggctatcggtatgttggtagggctgggagcatcggctcgcatttcaatcgttttgggacagaacgacaaagtcaaagctgaaaaaattttggcaaacagtcttgtactttcgctctcgtttgccgtttgttacctcaccttcttctcggtttacatggacaatatactgcgcagtttcggcggcagcgaccgtaccattccatatgccagagagtttctcatctacatcatgccgggtatgctctgcaccaatctttgttatagtttcaacaatatgatgcgagcttcggggtatccggaaaaagccatgtacactatgctcataggtgctttctccaatcttatcctcgcaccgattttcattttctggttagattggggaataaagggcgcagccatagcgacagatatagctatggccatttcggcagcatttgtcatgatacatttcttcaaccctaaaagccagttgcgattccatcgtcgatacttcaaactcgaatggggaatcctgttcaacatcgtttccatcgggttagctccgtttttggtcaatgtagccagcagcgttatcaatgcaatcatcaacacatcgctctatcggtatgggggagacgaggcgataggtgcattcggtattttcaacagttacgccacattggtcgttatgctcattatcgggttgtgtcaaggcatgcaacccatcgtagggtacaattacggtgcaggtaattacaccagaatgaaaaaagcattcgttttaaccggcatcgtagcgaccatttgttgcacggtcgggtggataggttcaacctttttcccgtattacattatacgggccttcactaccgatacgaacctcatcgatgtagccatacacgggatgcgcatcgttatgggtgtattcccgattgtcggattccaaatcgtcaccaccaacctgttccaatccttaggtatggcttctaagtccattttcctcagcttgacccgacaagtcatattcctgattccgttactacttatttttccccgaatatatgccttgaacggtatatggatagccatgccggtttccgatacaatcgctaccgccatcactctgttattactttggagaaccgataaaaaactacaaaataaaaattcggttattacccggtgatttaaaacgagaagagcctgccccaagacagactctccctattttactctacgaaaaataatcacttcttcatgaccggaatttcgcggttcatgctttgttccaacgaaataagagtttccgtcgaaaccaccccgtgaatattctgtattttgtcattaagcaactccatcaaatgctcgttatcgcgagcgtataatttacaaagcattgtgtaaggacccgtcgtaaaatggcattctactacttcgggaatcttttcgagctcgggaacgacatcgcgatacatcgaacctttctccaatttcaccccgatataagtacacgtcctgaaacccaaagatttaggatttacatggtatcccgatccggtaataacatgcatgtcgatcatacgctgaatacgttgatggatagcagcgcgggaaacaccgcattcggcagccacatctttcgacggaatgcgggcattgcgcattataatttcgagaatctgacgatcaaggttatcaatcttttccataaaattttaatatataaatcattttgcgacaaaaatatcatttcttttttaataaacagctatattttatctattttttgacaaaaagacaaacaaaagtttattcttaatctattattagcattttatctgacattttttcacaaaaaagtgccactcaaacaagagcggcacttcaaaatatttatagaaaatctatctatttgacaatatccaaaacctctacttcaaatatgagagtcgaattggtcgggattttatcacctccgccacgaactccgtaacccagttcggcaggaatatacaagatatatttaccgcctttttgcatcaactgcaaaccttctccaaagcctttaacgacttgcgtaggagagaaagtagcgcttgcattggaatcgaattgggttccgtcgatcaaagttcctttgtaagatactttcgcacgttgattggattgtactttatcgccttttccttctttaagaaccttataaagaagtcccgattcagtttttaccacaccttcttctttggctttttcagcaaggaaagcctcgcctttcgccaaattttctttggcttcgggagtctcggccaaacgagcgagttcttctttttccttagcttcggcggctgctctgaaaatagcatcgagaaccgaattggattgcatagccgaaatcaacaaagtcgtatcgccgtccatagcttgtttataagcctgaacgaatgtcgggatatcgatctctacgccggttccttgtttgatattattcaacatctccttaatataaagaccctgactcaatcccatttcataagaacgctgcgtagaatcggttttcaaggcagcggccaaacctttcataaaatcattgggatcgatgtttttaagctgttcgtacatacccgatttcagggcttctccaaaacgggcgccattagaaacacccagagcatagcttgcgctatctgctgcattttccaacttagtagcggccttgtttccgcaagaagacattgccgtcaaaccggcgagtgccacacaaaataaaatagtctttttcattgtttattgggtaaataattataatatttttattagttccacttcaaaaatcagagtagcgtttgccggaatacttccgccggctccttgctctccatacgccaaatcagaaggtatatataatttccaacgagaaccctcgggcattaactgcaaggcttccacccaaccgggtatcacttggttgaccccgaatactgccggagtaccccgctgtatcgaactgtcgaacacttgtccgtcaatcaaagttccatgataatgacattgaactttatcggtaactttcggcttacgaccttttccctcggcaagcacttcatattgcaaaccgctgggaagtaccaccacaccggaacgcttggcattctctgccaaaaattcttttccggcctgtttattcgtctcggcgatttcatcttgcaaattggaaaaaaactcgttgatgattttttttgcctcatcgaaactaatttccggtttttcctgtttatatacagcctctacacctttggcaaaatcctcgacgttcaacgatttgatacccgagcctaaaaaattgtgccccatgctgagacctaatgcataacttaatttgtccattttctatttttattgtatttaagcaaacataataacaatatttgcgaagcgaagatagggcttttatacttaattcaataaattctccttaaaaaaaaacataattcccgatggaatagtgtcacccattccaaaatctcaacacattttattaaaaaacatttgcagccgccgaagttttactctaactttatcttaattatttaagatgaaatccattttgttgaaacaaaaggtatgaaaaagaaactggttgtattgacaggcgcaggaatgagtgtagaaagcgggctttctacattccgagacagtggagggttatgggaccgttaccccgtagaagatgtcgcaaccccggaaggctgggaaagaaatccagctttggtacaagagttttataacaaaagacgcaaagaactcctcaccgtcgaacccaataaagggcacttcggattggcggctctcgaaaaggattacgatgtaacagtcatcactcaaaatgtagacaatctacacgaacgcgccgggagtactcacgtaattcatctgcacggagaactcaccaaagtacgctcgacaaaaaatgaaaatcgcatttatgaattgtctcccgaccactatgaaataaaagccgatgaaaccgaccgatacggaaaccggctgagacctcacatcgtatggttcggcgaagccgtacccatgatagagccggctatcgaaatcaccgaagaagccgatatattcgtcgtcatcggaacatcgctgaacgtttatcccgccgcaggattgctccgttacgtacgtccgcaagtaccgatataccttatcgatcccaaagaggtaaaagttcctgtcgatcgttccgttcgggttatccaaaagggagcctcggagggtgtggcagagcttatcgcattattacgacgataatctctcttaccaacgataaaagccgtcccgaatattcgggacggcttttatcgtatcgtctcatttcaagcatgttttacctgctgctgtttgatggcatcaaccacattgataacgtaatcgcccaaccgttcacactccgaaatcatatccatatagtatattcccgattggtattcgtaatgtttattattgatgttttcgacattagccccgcgcagttgattcctataattattaatctcacactctttattatacgaaatcattatctcgctcataagcggttcgttactcgacaggagcgccaccatattggacaacgcttcggaatcgagtttaaacatcgcatcgatattacttacaatctcgtcgttaaaatcgatatgagagtcttgcttccgttgcaaagtacgagcgaggttataacaacaatctcctatactctcaatctcggtcacgatagtaagcatactgtttaccatcatttttccttcatagctcaaccgaccgccgacaaccaagttcaagaatccggcaatttccaattccatacggtcgcaaatctgctcgtatttctcgatacgattgtataatttcaaataggcttcgcttccttccttttcatgtaataaatcggcgaccataccgaacatgcgttgtacccgctcggcatacaccgcaatctcctgatgggcttgcggtaggtttaattccgaagccgacaacataccccgcgaaataaatttcaattggaactcctcttcgttcttatcttttaccctcaccaagcgggtaactatcctctcatataagcctgtaaaccaaatcataatggttacattgattacattgaataccgtatggaacatcgataacccgaacgatacagaaaactgcatggctgcaaaatgagctttttgctgttcgaaatcggcagaacccaaattctgtccgctattcagcgcggcaaccaatgctggatcggattgctcccaagtggaaataaacgacatcaagtcattcgggttccctacccccaacgaagtacaaatccacacgataaaacgaatgaaaggataatacaaaacaagtgcccacatggaaccgagcatattgaacagcaaatgacccatcgctgcccttttcgccgacacattcgcaccgatagaagccaacagaggagttatcgtcgtaccgatattactacccaaaatcaaagcggcagctatgtcgaatgaaatccaacctttgctacacatgattaaaaatatcgccatcgatgcactcgatgactgcacaatcatcgtgagaatcgcccctacagcacaaaatcccaaaatagaaatgaacccatgctgcgtgtaagaagacaaaaactcaaacacctcgggattacttctcaaatcgggaaccgagttgtttatataactaagccccatgaacaagaatgagaatccgattataaactcgccccacgatttacgagaacttttattcgaaaacaacaaaggaactcccaaacctatcaacggcaaagcaaaaattgtgatatcgactttgaatccaaaaagagagataagccacgccgtggctgtcgtaccgacattcgcccccataatgactgccatcgattgccccaacgtcattaacccggcattcacaaagctgacgaccattaccgtcgaagccgacgagctttgaatcaatgctgttatcaatattccggtcaacattcctgaaaaccgatttttcgtcatcacggcaaggatattacgcagtctgtctcctgctaccttctgtaacccttcgctcatgaccttcattccatataggaacaaaccgaccgacccgatcaaagtcaagaagtccagaaatgtgtattccatgaaagtttcttaaatagttgttttattatcctctttgtagtatatttaactcacaatctgcatctggaaatgattcctttgcaaaattatacaaataaaaagatttacatcaggtagaaattgccgtttttatttttattaacaattaagaataccatcgaaattatatcccatcaacattatggaaaaagaacaatttgacgtttattgtgtaaacacaggaaaaacgatacgtgtaaacggaggtgaaagcctcctcgaaatctataaactggcaaatcctcgactggctcaccgcccgatttgcgcttacgtaaataacaaaaccgaagaattgaaataccgggtattcgggcccaaagacatcgaatttctcgatatttctcacccggcaggcatgcgcacatatgtgcgttccctctgttttgtcatgtacaaagcaatcaacgacattatcccgggaacaagattacgtatagaacattccctatctcacggatactattgcctactcgataatgaaaacgccctcgaacccgaatccatcgataaaataaagcatcgcatggccgaaattatagccgccgacattccgttcaaaaaaatagaatgccacacggccgatgccatagaagtttttcgggaacaaggtatgttcgataaaatagaattgctgaaaaccacacacgagttatatactcaataccatactctcgacggtctcgccgactcgtattacagttggctgactccgtcgacaggatatttacagggattcgatttggtcaaatataacggaggggtgttgttagttcctcccacgcccgatgcaccgaccgaaccggctctgatagaaccgcaagaaaaaatgttgaatgcattcaaagaatacctcacgttcaaccaaattatcggattgagcaatataggagacctcaacaaagccgtggaaacaagacaggcaaccgacttaatcaaagttgccgaagcccttcatgaaaagaaaataggtaaaatcgccgacgatataacccgacgctatcacgaaaacggtactcgtatcgtacttatctcagggccctcctcctcggggaaaaccacattctccaaaagattatcgattcagctcatgaccaatctgttgaaaccggtagccatatctctcgacaactattttgtcaatagaacagacacccctctcgacgaaaccagcgactacgattacgaatcgctctacgctttggatttagatttgttcaataaagacctcaacagattattacaaggcgaaacaatcgagatgcctacttataatttcgaaaccggcgaaagagaatacagagggaatactctgaaattggaacaagggtctgttctcatcttggaaggcatacatggattaaacccggatttgacacctcaaatcgaaactcatttgaaatatcgcatttatgtttccgccttgacgaccatctccatcgacgaccacaactggatacctactgccgataaccgtctgttacgccgcattatccgcgatcataagtatcgcggggcatcggcacagagcaccatagcccgttggggaagcgtgagacgaggagaagaaaaatggatattcccctatcaggaaaacgccgatgccatgttcaactcttcactccttttcgaactggcggtaatgaaagattatgcacaacccatactcagcgccgtaccccatgattgtcccgaatatgccgaagctcatcgtttgctccgtttcttaggatattttcaatccatcaatcaacgcgaaatacctcctacttctcttctcagagagtttctcggcggcagcagcttcaaatattgacgacatgaagggcaaatcgaaaacgaaaacgaccacttttagaaagtggtcgttttcgataattagtaagaaatcagcagggattgtcttttcatacttctaccccctctccccctgccgtgtcccataagtattacggggtatcgcgcagtgatatgaagggagcgcccacaagggtcgatacaaccccactatcctaaaaattctatttttctcgctctatcgtgtagtccaagatcgcaatcaaagcatcgatcgtttcggaaggaggaaaaacggacaataggtccacagcttcgttacgaatacgtcccatagttgtataggcatactcgatacctccttgtgttttagcatactcgatgagtgtatgcacgctgtcggacgacaaatattcctcgctcaacaacaaatctctcattcgttcgttttcagagccctcaccatgagtaatcgcataaataagcggcagtgttattttcccttcccgcaaatcgtttcccgtgggtttaccgataactttatcttcgtaataatcgaaaatatcgtccttaatctgaaaacaaagccctaacttttctccgaacattcccaatctcgcgacatcttcggcagaagcgccggcagacagtgcacccacctgcatacaagcatagaacaacgatgctgtctttcgccgaatcacttcgaaataagcattttcgtcaagcaaatgattgcgggcattggaaagctggtcgatctctccccgagccaaatcccgtcccaagacacccaaacaagaaacaatcggcatcttgttcgtttttatcgaacaagccaaagcacacgacacgaaataatcgccaaccaaaaccgctatacggttatcatataaatgattgatcgtcggtaggcctctgcgtttctgcgattcatcgactacatcgtcatgaatcagactggcattatgcaacatttccaacgaagctgctgcgtcaatggcttcacgaggaacttcaccaaacaacttcgcacacagtaacaccaatatgggccgaatctgtttccctttgctttcgagataagcctgaatcacctcattcatcagaggactggtcgtatgcaaagattcagtaagggttttattcagtagagcaagctcctcggttatcggctgccgtatgctaaaaagtttatccatatcaatttattctggtgcaaaaatagtaataaaacaaaagaatccgtatttttatcgtaattttaccgcattacaaagatgcttttttaattcttatctacaaacagcatacccttatgcaagagaaacgactatttttattagacgcttacgcactgatttaccgttcttactatgcgttcatcaagaatccgagaatcaactccaaagggataaacacctctgccattctggggttcgtcaacacgctcgaagaattattgagaaaagaaaacccctcgcatattgccgtcggattcgatccgcaaggccccacatttcgccacgaggcttatgaacaatacaaggcccaacgggaagaaactcccgaagtaatacgctattcggtcccgatcatcaaagagattatccaagcctacaacattcccattatagaagttcccggcttcgaggccgacgatgtcataggctcgctggcaaaacttgccgaaaaggagggcttcgacacctacatgatgacacccgataaagattacgggcaattagtatcgtcgcacattttcatgtatcggcccaagttcggcggcgatttcgaaattttaggaccggaagagataaaaacgaaatacggcatacaatcacccgaacaggttatcgacatattaggattgatgggcgacagctccgacaacatacccggctgtcccggagtgggagaaaaaacggcggtcaaactgattgccgatttcggaggtatagaaaacctgcttgcaaacaccgatcggttaaaaggagccttgaaaaccaaagtggaagaaaaccgctcgcaaatagagttttccaagttcttggcaaccatcaagaccgatgtacccttgactttcgacgaaaaatcacttcgacgggaacctgtaaacagtgaaaaactgagacccattttcgaagaattggaattcagaaaccttaccgaaagagtattgggaaaccaaccgacaacgccggcacctaaaaaaacggtacaaccctccctgttcgacaatgttcccgaaactgaacaaacagacaactccgcgccccagtcgaatttggctaatatcgcatcgattccgcacacctatcatttaaccgacacccctgaaaagatgtgggacttggcggcattgctatcttgcgcatcggcattcgcattcgacacggagacaaccggcgtagacccgatgaatgtagagttggtgggactttctttcgccctaaaagagcacgaagcctattatattcccattccagaggatcaagaaaaagcccgggaaatcgtaaacatcttcaaatcggctctggaaaatcccaaatccttgaaaataggacaaaatatcaagtacgactatatcgtcctgcataactacgggatacatgtcaaaggcgatttcttcgatacaatggtggctcattacctgttacaacccgaacagtaccacaatatggactatctggcgaatgtatatctcggttacgagcctgtgtccatcgaaaaactcatcggtccgaaaggaaaaaaacaactttccatgcgacaagtcccggtagaacaagtttgcgaatatgccgccgaagacgccgatgttaccttgcaactgaaaaaccggctcgaaaaagagttgaagaccgaaaaaatggaaaagctcttttacgacatcgaaatgccattgacaaaagttctcgccgacatggaaataaccggagtcaatgtagatataaccgaattaaaaagctcctcggatatcctcacccggcgcatgaacgagttggaacaagagattttccaattggcaggcgttacattcaacgtaagttcggcacgacaagtaggcgaagtccttttcgaacgattgaaaatcgatgaaaaagccaaaaagacaaagacgggccaatattccacgaccgaggagatattggaaaaacttcggtcccgccaccccatcgtgggtaaaatactcgatcaaagaggcattcgcaaactattgagtacctatatcaatgccctgcccgaattgatcaatcccaaaacgggaaagatacatacctcgttcaaccagacgattacctccaccggacgactcagttccagcaacccgaacttgcagaacatacctatccgcgacaacgaagggcgagaaatacgccgtgcattcgtaccggataaagactgcgttttcttctcggccgactactcgcaaatagaattgcgtatcatggcacacctgagcggagaccggcacatgatagaagcattccgggagggatcggatattcacgcagccacagccgcaaaaatttacaaagttcctatcgatgccgtaactgccgatatgagaagaaaggccaaaacagcgaacttcggtatcatttacggcatatcggtattcggcctcgccgaacgactgaatataccacggagcgaagcaaaaatattgatcgacggatacttcgaaagttatccgcaaatcaaagagtatatgaataaaagtatcgaagttgctcgggaaaaaggctatgtggaaacgatttgcggccggaaacgaatgttgcccgatatacattcccataacagcgtcgtgcggggatatgccgaacgaaacgccattaacgccccgatacaagggagtgcagccgacatcatcaaaatcgctatgatacgtatcgccaaacgattggaaaacgagcatctacgaagccgcatgattctgcaagtacacgacgaactcaatttcaatgtacccgtcgaggaaatcgagagagtaaaagctatcgtctgcgaagagatggaaaacgcctatccgttgcaagtgccgttattggccgactccggtgtgggccgcaactggctggaagcccactgaccatagagaaaacacaggaacaaatattgcgaccgataagaagctgttttaaatttattccaagacagattgagacctatgttgaagcagattggagtccgagatatgcagtcaatagcgggctattgacaaaaatcaagggatgcaagacaggggttcaatatggccggaacatacctgcttgcaatgataatattatttctcaataaatttaaaacagcttctaaattaatgtgtaattttgtcgacggttaagacggtttataggaatggatattcagaacttttctgcgctttttaacactccggcgagatgtgaagcgtttttgaaactcattaaagacaacaagacaaagcacatttttatacagggactcgaaggttcctcgatagcgcttttcttttccaatcttctagaacataaacaggcacacatcatcattgcaaacgatttggacgaagccggttatctgtacaacgacttggtgcaaataaacggtaacgaccacattcttttatttccatctggatacaagcgggacatcaaatacgggcaacccgaccccccttccgaaatattgagaaccgaagttctgaaccgcctgtgtcaaaaaggagagtcgctattgatagtcacttatcccgaagctatcgccgaaaaagttgtcccggtcaatatgctttccgaacagacccttcacatcgacaaaaattcgaagtgcgacatcatcacactatccgacaaactgagagaacgagggttcgaagaagtggactatgtgtacgaacccggtcagtttgctgtacggggtagtattctcgacgtcttttcgtataccaacgaattgccctatcgtatcgattttttcggtaaagaggtagaaagcattcgtactttcgaagtggaaacacaactttccaccggaaaattggaagaagtttatatcgttgccaacgtatgcggacaggaagtctctggcatctccatactcgatttcatcgataaaaacacgattttaatctgtcacaatctgtcatgggtgatcgacagaatttcaaccatagcttccgaatcgctctccgagcaaacccttatcgccgaagagggcgaccgctatgctatgcaaaaaatcatcgatgtaacagcttttcaaaaaaagataactacatttcgaaggatagattatggagcaagcagtgaagcgaatgcgccggcggtcattcgtttcaactgcgcaccacaaggtgtttatcacaaaaatttcgatttagtcagccaatcgttctcccaattcatcgaaaaaggctacactctttacatactcagcgacagtgaaaaacagatagaacgattgcaagctattttcgaagaacggggtgactccatctcgtttacaccggtattgaaaaccttgcatgagggattcgtcgacaacgatttgaaaataggttgtttcaccgaccaccagatattcgatcggtttcacaaatacactttgaaaagcgagcatgcgcgttctgggaaactggctctttccttgaaagagctcaaccagatagaagtcggcgactacatcgtgcatgtggatcacggtataggtcgtttcgggggattgatacataccgaaatcaacggaaaaatgcaagaggtcattaaactgacttaccaaaacgacgatattatttttgtcagcattcacgccttgcacaaattggcgaaataccgggcaaaagagggagaagctcctcgtatcaacaaactgggaagcggtgcttgggaacgcatgaaagagaagacgaaaggcaagatgaaagagattgcccgcgacttgataaaactctatgccgcccgtaaagaagaaaagggattcgctttctcgcccgactcgttcctgcaacaagaacttgaagcatcgttcatttacgaagatactcccgaccagataaaatccacagccgaagtgaaagccgacatggaacgcgaacgccctatggacaggctcatctgcggcgacgtgggcttcgggaaaaccgaaattgccatacgtgcggcattcaaagccacctgcgataacaaacaggtcgcagtactcgtgcctaccaccgtattggccttccagcattaccaaaccttcaaagagcgattgaaggagttcccggtacgtatcgaatacctcagccgagcccggaaagcctcagaagtaaaagccattttgaaagacctcgccgaccgcaaaatagatattatcatagggacccacaagctcatcgggaaagacgtgaaattcaacgacctcgggcttttgattgtcgacgaagaacaaaaattcggagtggccgtaaaagagaaactcaaacagatgaaagtgaatgtcgatacccttacgatgtcggcaactcccatacctcgcaccttacaattctctttaatgggtgcacgcgacctttcggttatctctacccctccggccaatcgtcaccctatccaaaccgaagtacacgctttcaacgacgacattatcaaagaagcgattaacttcgagatgagccgaggcggacagatttttttcgtcaacaaccgtattccccaactgtacgaactcgaaaacacgattcaccggctggttcccgacgcacgtgtcgtaatcgggcacggacaaatgccacccgaaaaattggaacaggcaattatcgacttcgtcaactatgattatgatattttactggctaccaccattatcgagtcgggaatagatatgccaaacaccaatacgataatcatcaacgatgcacaaaacttcggattaagcgaactgcatcaactgcggggacgtgtaggccgcagcaaccgaaaggctttctgttacctgctcactccaccgcgccacacattctcggtagatgcccgccgacgattacaagccatcgaaagtttctcagaattgggaagcggcatacacatcgccatgcaggacctcgacatacggggagccggtaacctcttaggagcggaacaaagcggtttcatcgcggatttaggctatgaaacttaccaaaaaattttaaaggaggctgtcgaagaattgaaaaacgatgaattcagcgacctctattacggagccgattcggatacgaaacccgaagagttcgtctcggaatgcaccattgagtccgacttggaaatcttattcccggcaaactacgtaccacaggaatccgagcgtatctccctatatcaagagctcgacaacatggagcgtgaaaccgatatacgacaattctgcgagcgcttggaagaccgtttcggacgcataccccacgaagctatggaattgattcgggtagtccgtctaagacggctggctaaacaattaggaatcgagaaagtagggttgaaacagggatatatgtatctttacttcgtttcggacgagcgtgtcgcctattatcaatccgctgcattcggtcgcatcttaggattcttgcaaaaaaatcccaaactttgtaaattgcgggaaataaacggtcgccgctcgttagctataaaggacatcacttcggtggaatcggcggtatcggttttggaggaggtgttgcagacacttccggtttagcagaagacggcacttccgtatttttctctttcatggttccccacggaataccccacaactcatcgggattatggccagccgtcaatagagccgaattaatataatcccgtcccgacggattttggaacggatacagaccgaaccggggcatgatagcagcgtaatgttcgaaaatttcggcttgtatagattcatagcttacccaatttttattagccgaaaagcaatataactgcaaaggcaacccgttatcgttaggatctaacgttctgaccataagagtcaattgatcgttgataaacttatgttgttgtaaataaagagtcatgtaagctctgaaaagccctaaattcgtctcaatcgttccgttcaccagccccgcgctattttcggtattttctacaattcctttttgttgttgagactcttttttctcgatgaaatcgcgcagaatatcgatttgtttcaaattttgcaataattcgggggtacaaaattttaccgtgttcaggtcgatggtaaacgagcgcatgatacgacggccacccgaatcggacattccgcgccagttttgtacctcccctgaaataagcgaataaggaggaatcgtcactatggtattatcgaaattctgaaccttcaccgtattcaacgaaacatcgataacgactccgttcacggcaccacccggcacgacaatccaatcgccgttccttatcatatcgttttgcgagagttgtacaccggcgacaaagcccaatatgctgtctttaaatatcaacatcagcactgcggcaaatgcgcccagtccggtaatcaaagccatcggcgaacgttctatcaaaatagataccgcaataatcacccatatccctatcaaaagtcctttgataatttgtatcattcccttcatcggccgatcccgaaatgcggtacgacgagaatagatacgccaaaagaccgaaatttgcgtattgatcgagaaaacgaggactccgagcagataaatccagcaaactttttcgataatccgtaatagttcgggagttccgtgaaaagcaaatggcaacagagataaaatcaccaacggcgggataacatgcgttatatgggtaaagactttggcttcgaccaaccctttcaacagatcccctcctttatattttataatccgatgaatcacataaataacaatcattctcaaaatccttgcaaccacaatagcgatcacaaaaacaagaataccatacacaattctatcccaaaccggcgaagactctcccgttattctatgcaataaagaagatacccattccatgagccggtcggctacttcataagctttattcatcaaatatcttttttgttaaaacgttttcataccccagagagttcactaccgatcagagatcgggtaacccgcttaaataagtctcaaacaaaaaaagaaattcctttcagaaggaatttcttttttccacaataaacgaaaactaatatatgcaactattgaaccgccactttcgttccattaacaatatacattcctgctggaaccgttatttctgaatttccacccgaaactctgaccatacgaatcaactgcccggtaaacgaatatatataaatatccatatcctttggaacagaaacatagatagctcccgatcctccataaacgacaaggctgtcgacaattcccgactgaacacccgatggagttttaatataaggttgtgactcgtttccataaggatcgatagccgttatagcatacacatatcccgattgagtataagaagaaacatctatacttttttcccatgtaactcgcttcaaataggccgatgtttcataggtttgaggattattagccacgcgactgggtacgaaatacacggcataacgtatcgtttcatctgcatcagccgaccagctcaacatatttcccgacaccgaaatatcggtaatatcgggcaaatcacagggcgttttccagctcataacgggcgttaacgccggttcggtaaatttattctcggcgacataagtatccaacccgtaactgaaaaactgcgtcgtattgaaaaagacgtgtccgggagcccccatcagatcggtcgatcggttcatatccacttcaaacccgcactcttccgtacctttggctgctgtcgcggcgatagaacgttccaccatcgacaaaccgttatattcgttctcgctcatgccgagccgacgcaatacacttttcatacgctgcggactattttggggcatcgtagaaattcgcatactcgaataaaagtgtctgtccatcgtcttggccaccttcgcccaccacggaaccaatgtcttatacccccaaacatgagtgttgaaactcggccagtaacattgtggcgaaatatagtctatcgttttcgctttcaaccaagccactccatcgcaatatagttgggaataggcactcgttcctcctcttgtattcaaatactctataccatacgaagcggcgacactactgctaccgccccatatcccgaaaggccctataccgaatttcacggtcggtttcgtctcctgtatcatagcgtaaatatcggcgataagtttgttgcaattctcacggcgccaatcccccacatttttcccttcgggtttatatagactctgagaataggcatcttcatttttagtgccttcgtaggggtaaaagtaatcgtcgaacacaataccgtcaacattgtacttggtgactatatctttggtaaccttcaccaaatactcgattacctcgggattccccgggtcgagaataaaactcgacgaatactccaacagccactccgggtgattcttacgtatggaatcatcggctccgttcatatttttttcactctcatagcgatatggattgatccatgcatgaagttccattccccgcttatgcgcctcctctatggcaaacgccagcggatcatatcccggatcgaccccacgtgttcccgtcaaaaacttcgaccatggctcgtaggccgaattgtacaaggcatccgacataggacgcacctgcaaccaaaccgcattcatacgggccgcctgcataccatcgaatatcttaatcagagcggccttttgctcttccgaagtctgggtcgatttgggccaatcgatgttactcaccgaggccaaccatgttgcacgaaattcacgttttggagattcggcccaacacccccaaataataccgatagttaaaaaaaggaaggataattttttcatgttattcacaaaacattagtgtattttgcaaatatatccctttaaatcaattcttcaaggctattttatttaaataaataaaacgacacataaaatatataattattatacaaaatcgctaattgaacataatacacagaagtaagaaaagaatcgctatctttgcaaggaatatgaaaacagattacgtttcgtcgtaatcaaacgactttgcgtctgttttcgtgcagtattttgcaacaaattatttcgattataaccgaaacaatattatataatgagtttacaatgtggcatagtcggcttacctaacgtgggtaaatcgactcttttcaattgtctgtccaacgcaaaagcgcaatcggcaaatttcccgttctgtaccatagaacctaatgtaggtgtcattacagtacccgacgaacgattaaacaaactggcagaactggtgcatccgcaacgaatagtccccaccactgtggagattgtcgacatcgccggattggtcaaaggagccagcaaaggcgaaggtctgggaaataaattcttggcgaacatcagggaaaccgatgcaatcctgcatgtattgcgttgcttcgacgatgacaacattacccacgtggacggaacggtcaatccggtacgcgacaaggaaatcatcgatttcgaactccaactgaaagacttggaaaccatagaatcgcgcatttccaaagtccaaaaacaggctcagacaggaggagacaaagcagcaaaggttacatacgaggttttaagccgatacaaagaagccctcgaacaagggaaggctgctcgtaccgtcactttcgagaccaaagacgaacagaaaatagctcatgaccttttcctgcttaccaacaaaccagtaatgtatgtctgcaacgtggacgacaacagcgccgtatcgggtaacaaatacgtggatatggtacgcgaagccgttaaagacgagaatgccgaaatccttatcttggcagctaaaacagaatcggaaatcgccgagtttgaaacttacgaggaacgacaaatgttccttcaagaaataggcttggaagaatcgggcgtttcccgtctgatccgagcggcttacagcttgctcaatctcgaaacctacttcaccgccggacctcaggaagtacgggcatggacctatttgaaaggcagtaaggctcctcaatgtgccggtattatccataccgatttcgaaaaaggttttatccgagccgaagtaatcaaatacgacgactatatcgctctcggttccgaaaacgcttgtaaagaggccggtaaaatgtacatcgaaggaaaagaatatgtcgtacaagacggcgacatcatgcacttccgattcaacgtataatttacacagtcattaccatacaaaaaaatgcgatgaaaattcatcgcattttttatatcctccttcaagaaccgtcaatgctttcccgatagattcaaaatctcgtcatagcgggatttattgcccaaaatacgacaagcctcctttaaatctttatcgtttttgatcgactctataatttcgcctttctgataataataccgtttcacaatctctatcgaaagtaattcggcgatttcatcgtgaaaagtctccaaatccctatccaaatcgtgattcaaacaagcttcaagcgcttcgaactgcttctgcgtgttttcatcgaaatatccttcgaatttagcgacctcctttaagtcggacaatatccgttcactctgtttgtcgtatttgaaatccttcgatttcacaaaagctttgaattcctcgtattcttcgtcggacaatttaaaatctttcggagccggaatcgtatcgtgctcggctgcataccgagtcgcataatcgaagaaatagaaatctttcatcaaataatagctgatattcccccgcctttccatcgaagtttccacatcgggttttataccgcctccgtcacggacaatcctaccgtgagcggtcttgaactcgtgggtaaggctatcgggaatacgggcgacgctcccgtcgggattgcgatgcgaataatcgatagcttgtatcaaacgtccgctgggtatataataacgagcgatcgttaccttcaacataccgttataaggcaaaggccgtgtggattgcaccaatcctttgccataagaacgcgaaccgataatcacagccctgtcgaggtcttgtaaagctcctgccacgatttccgaagaagatgcggttcctccgtcgatcagcacggccaaaggcattttcacatcgactggctcctgagtggttttataaatcttatccatcttcttatttcttccccgggtagaaagcacctctacccccttcggaacaaataaattgacaatctgtacggcttgctccaaaataccaccgccattactgcgcaaatcgagaaccaacgaagttatcccccgttttttcaagtcttgtaaagcccgtttcacttctccggccgaagtatcggtaaaactactcaaataaatataccccacgctatcgcataccacatcgtaataaggtacggcaggcatttgtatcttcttacgggtcaactcgaaagagagcaagtctttcacaccgggacgttcgaccgtaactttcaactgcgtattcgcaggtcctttcaaccgctcgctcaccttcgcactcttccaccccaacacagtatcgttatcgatcatcacgattttatctccgggacgcaaacccgccaattgagccggcataccctcatacggctccgaaatgtaaacggcattatcccgctccataatgaaagaaccgatacccgcatattctccggtagtcgaaaagaaaaaatcgtctttctctttctcaggtatatactcggtgtaaggatccagacgcgccaacatcgcatttacaccgtcgccgatagccttctcggcattaatcgtatcgacataaaacatattcaattccttaaaaagagaattgaatatatcgaggttacgtgatatttcgaaatttttctcgtcagatttgcctgcccatatcggatttataaatcccgaacaaaaagataataccgttactgtcgcaaaagtcaaccttatatttttcatttcacttcttttaatcacacgaagataactaatgccgaatatcttcggcaaccatagaagatacttttaactttatttcagtccaaatctcatcgctcatcttagtaccgattactttaatcacacgacccgccaataaagaaccgatagcgccgcagactcccaacgagcaattttgagaaagaccgtaaagaaatcccgaagcatataaatccccggctcccgtagaatctactcgaacctctggtgtcgcaggaacctcggtaattatgccttcacaccctacgaaagaaccttgtgcaccacattttacgacagcaatcctacaatatcgcgacaatatctctgtcgctttacggggctcttcgcctgtataggccaatgcctcttcctcgttcgcaaataggatatccacataattctccaccaaatcacggataatcgcataattatcttttactacattgtaactcgccatatcgaaagaaacagacaagccggcctcttttgccaattgtacggctcgtaaaatcaacgaagtgtcttgcaccaaatacccttcgatatgcagtatatcatacccttcgaacatttcggcagagagctcctcggcgcacaaagtagccgcagcacccaagaatgtaccgaaagtccgctctccatcgggagtaatcatcgtcatggcacaacccgaagcctgttctccttcgatcaataaagtctgcacgccattgcgctccatatcctcccggaagaaacgtccataagcatcccgacctattttcccgatgaatccgctctctattcccatacgggctactcccgaaacagcattagcggccgacccgcctgatgctaaggtggtttccagcccttcgaaaaccgacatgattctcaaaagcttctcttcgtctataagttgcataccgcctttcagcagccccatctcatcgaaacactcgtcggaatgtaaccgtgcaagtacatctgtaagagcatttcccaatcctactatcctcattctggaaattttttttgcaaatatattgcataattggaaataagccattacttttgcaacgcatttttaacgaatgcaatcttcttcagtagctcagtcggttagagcatctgactgttaatcagagggtcgttggttcaagtccaacctgaagagccgattttgatatttttattcttcagtagctcagtcggttagagcatctgactgttaatcagagggtcgttggttcaagtccaacctgaagagcttcgggagttcgttcgtaagacgaactctttttgttcaatcaaaccgataaatcatggacgattcaaactcacgaacgtacacaagtagtattaacatctcccgtgggagtaagtgagatttgatgtcgaatcttgcgggctcccttcgggatacaaaaaagaaaggagcaacgcaatgagaaagtatctcttttgtgaagcaggttttatcgaaaaacccaattggcttcccaactgctgggtaaatgtcgaatgccctacacccgatgatttcgatttcctcgaaaaagaattgaatgtaccggctgcatttttacacgatattgccgacaccgacgaacgtccccgtatcgattcggaaggaaattggttgttgactattttacgtatccccatcttcgtaaaagacaacaacattacctatacgaccgtacctatcgggattattaccaataacgaaatcatcatttcggtctgctatcattcgacagccatgatccccgatttcatcgaatatacccgacgtaaaggaataaatgtccccaaccgatatgaactgattctccgtctgatatactcttcttccgtatggtttctcaaatacctgaaacaaatcaacaacgaagtcagcacagccgaaaaagagttacaacaaagcatacgtaatgaagaccttctccgtttgatgaacttgcaaaaatgtctggtctacttcaacacgtctatccgaggaaatgaggtaatgataagaaaattgcccaaaatattcaatgagaaggattaccaaaatcccgaacttttggaagacgtgatgatagaattgaaacaggcccaaaatatggtgaacatttacagcgacattttaaccggaacgatggatgcttttgcctccatcatctcgaacaacgtcaacaccatcatgaaacgcatgaccagtctttccatcgttctgatggttcccactttgatagccagtttttatggcatgaacgtagacatacacatcgaagaacttccgcacgcattctctttaatcgtttgtttctccgtgctgttgtctgctttggccttcattgtattcagaaaaatcaaatggttctaagatattttctcggataacggtggagtaccaccgttatccgagagcttgattccgaaaattataaaaacacccccgaaacagtacccgattatgaaaaccagaacactttatatctccgatttagacgggactctactcaatagtaattcgatcgtaacctcccattctgtcgagaatatcaaccttttactgcaaaaaggtatgctctttacgatagctacggctcgaacaccagctacggtcgttcccttactgaaacaattacagctcgacctaccggtagtactcatgaacggagccgtactctacgacatacaaaacaaacattacatacaaacgaatggattcaccgatgactcggccctccgttacatctcggtactcgaaaatagagacttgatcccctttgtttaccgaatcgagaacaataaactccaagtgtttcacaaaccactcgtaaacaatatacaacgggattttaaatacaagcgggaaaacactccttataaagattttatacccaccgacaactatacggccgaactgaccgataatcctcccctattcatgctggtcatcgaccgtttcgacaaactcgaaacagcagcagccgaaataacccgtgccggaaattgtagtgtgttctgttatcgcgacatcgctgttcccgactatggaaatctggaaatatatcccaaaggagtttccaaagcagcgacagcccagcttataatcgaccgaataaatccgtgggaagtcgtagcttttggcgataacctcaacgatttacccctctttaacttggcagaccgccgatatgcaccggtcaatgctaccgaagaaatcaaaagacaagcgacggctatcattcccgacaacgaccacgacggagtagctcgattcctttgcgaagattttctataaatcgccctttatttataaataaaatatagatatattataaataatatagagcaattatatactaaaaatcaattacttatcgacagcattattttgtctagccatttccgcctctacttgtgctctcgatttactggttgtcaccacataaacacccaagaaaacaagaagaatggcaaagccctttttcaaatcaaagctatccattccccaccaaacagccaacaaagaagcgactatcggctgggtataattatacatgcttaaaatagtcggtctcaaacgtttttgtccgatagaaaccaacatataagataaaaatgtagcaccgaatacgacaaaaaacaaatcgagataaatcgtgccgctaagatcggaatatgggatgctcaacaaatcgtttcccccgagcggcaaacagcaaatcgtagaaaacaagaacatccacttcatcaaagtcacaggtgtataccggcttatcaaacccttaaaagccacataataaatagcaaaactgatttcagcgaccaaacaaaacaagtctcccataacccggccacccgaaagcccttccgaaacagtacccgctccgttcaaaataagcattaaagctcccgaaagccccataaatacacccacaaccttcttgccggtcataggctctttctggataaatgcagccaatatcatggtaataataggagccaaagaagcgacgaccgaagcatctatcggcgtcgtataagacaatcccaacacaaagaaaccttgattcaatgttatcccgaacaaagatgctacgaaaagcaaaagcaaatctcgtttagtaatcggctcccgaggcataaacaaagaagcaatccaaaaaagaatcgccgccccggccatacgcatgttggttagcgaaaacgccgaaatcgttccggtcaaaaagattgctttggaaataggcgacataattccccataagaaatttgccgtgaacatagccgaatggccttttaatttttctttcattcccttgctgttatttcgggcgcaaaagtacaaattgtttccacaataaagatttttcatacgacttttatttctccgtctttttccgttcacacaataaagaattatctttgcaataaaccgaggaaacaggcaagccacggctcagccccgataaaccgccacagttccctcatgcacgacattcagcaaaatattcacctaaaaacaatacacatgaaattcaaaagtcttatttttatagttcttgcagcttctatgacttgtaccgacatttacgcagaaaacaaccgccccatcgacatagctttatgggaaaacgggccgttagaaaagaatgacgatgaaggaaaaacatacgacgaaaacgtcagaatctatcgcccctcgatcaaagtctttctacccgaagggaaaaatacaggacgagccgtcatcatgtgcccgggaggaggatatgcccttctggcctacgaccacgaaggatatgcctatgccgactacttcaaacatcaaggcatcgccctcattgtcctcaaataccgcatgccgcacggaaaccacaaagtccccatgtccgatgtttgcgaggccatgcgggtcgtaaaatcccatgctgccgaatggaagataaaccccgatgacataggaattatgggcttttccgccggcggacacttggcttccactttcgcgacccactatccggcagaattacggccagctttccaaattctcgtttatccggtaatctctatggacgaaacgataactcacagcgggtcgagagaaaatctcatcgggaagaatccgagcaaagcactcatcgattactattccaatgagaaacacgtcaacgcagagtcaccacgggcttttatcgccctctccgatgacgaccgagctgtccctgtcgaaaacagcctccgttattacaaagccctgcatcgatatcaaataccggtctcattgcatatttatcccacaggaggtcacggctggggatataatgagtcgttccgattcaaaaaagccgttcatgatgaactttccgattggttgcgttcattttgaataagctccaaacatgaaaacaaaagcatattttaattggagcagcggtaaggactcggctttggccctatacagagcgttaaacagattcgacatcaaagcgttgcttacggttatcgactctacgaacaaccgcattcccatgcacggaaccaacctcgacctattgaaagcacaatctcaaagcataggaattccgctcgttacctgtgacataaataccgaatattcagaagataaatacaaaatatctttacaagaaatcatagacaaattcaaaagtcaggaaatttccactgccctattcggcgatattcatttgctggaattaaaaatcagcagagaagaaaaatgcagacaagcaggattaaaaacagattttcctttatggaacaattcaccccaagagctattacatgaatttatagactccggtttcaaagccataatcacctgtgtcgacggtagtgtactcgacaaaactttcgtcggcagaataatagactatgattttataaacgatttacccgacggcgtcgatatctgtggcgaaaacggagagtatcattcattcgtttttgacggccctatctttaaagaatccgttccttgtcacttgggccctgtatcgtataaagaatatccttgtcaagatctgaaacagaacaccggattctggtatatcgacatctacaatgctccctaacaaaaaaatctacaagaggataacgactgcattgtcgtatccccttgtagaatagcattacaggaaaatcggcttagagagatttctcaatcctcggcccgtatttttccaacaaatgacgagctgtatccaacaacgaaccctccctgtgtatctgaataggagtagtactatctacccactcttgctcaaaagtcgcaagccggctcttcaattcatctttattcaactctattcctttttccgccgcaccgatcacagcatcaaaataaatttcccatcgtttggcataataatcgttcagaagaccggcccatgtacgactcgcataatcgttcaaactaccgccccatgtagttattaaattacgagcatttttctcataataatttttcaattcgtcggtatcgcccaaactgcgggcatcttcaatccatttatccaacgatgcccggttgtggaaagaattcaacaattccaaatcggacagtatctctctcatttcagaagccttttctttcaacccgggaacattccgtttcttataaaaaccgtcaaattcttttttcacgtccaaaaaataattgcccaagagttgacgacctgtcataatcacatctatctcgaatgcatctctgtcgcaagacggaacttccaataaaagctcccacacccgcagcaatgtagcgttatcatactcgttactgatccgtttattatagttatctcccaatttcggccgatatccgggcaaaatacctaatgtacggggtacttgtacaaaaacatcttcaaacaatatctgccaagcctcgcgtaccgattctgaaacggctcctacatgcctatccgccaaacgctccacccaatcctttccattcacatctatcgtccacgctttctcaaagatatattcataagggaactgattgatatccagtccttccaatgtagagcctataccttttaagttgtctcctccatttatcaaagcgttatcgagcctgtcaccgctctcttttacatttccggtcaacgtggtattacctccaaaattccccaaataacaccagatataaggctgcccatgaaatttctccgtacttttccacagctctacattttcacaatgataatccaacaaaaccaatttatcggacggaaccccggtcaacagagctttcacccgaggtgctgtccacaattttcgatcgtgataaaacatccatgtcatttgcaaccacacggcatcggggtcggcagcagccaacgatttatacatatccgaagatacctgtgccagatattcgggctcccagctcggcggatccacctcgttaaaaggatccacaccataaatatggtctgtcccgaacatcttttcctgttcttccaagaaactcttttgaatctctgcaaaaagcggttcttcgggattcaagaaatgacagcgatacgaatcgccgaaacccgcccattttcccaaatattgaatattggcatcggggtgaatccgtttcaaggcagccggcacatgccctgcaaaagcgggcaataccggcgtcatgttcaattcgcgctcacgagccaagatctttttctgcaactcggcctgagattccaaccattgcatgggtaacggcccgttccagccatcgatattcgccatgcgatgccacggtaaataaaccgggcccgtaaaataagaacgaatctcttcatcggtcagccctatttttttccacactttataccacaccatctcttggccggttatagctaatggcatattcactccgttcaacgccatccaatcgataaaacgctcccagtccttccatttccaaaaaggcatggaatacccgtaagtacaataattcaagaaaaagcgattatccactttcgcttctacgacgaccggtttttccaccataggtaacacatcgggcatttcgaccggaatatcggcataccacgatacagtcgtcagacaataatatttcaaataataattcaatccggcagccatcgaattagcgttattcccgctaatgtggatttttccgtccttactttccaacgaatagtaatccctatcctcctcaggaactatctcgaacacgaatcgatcggcatattgggggattaaacgatgagtaagttgttccacggccaacacattgcgatccttcgaggaacaagccgtcattcccaatagcataaaaaacgaagcaataaaaaatagttttttcatctttctataatttgatataaatatgctttttgtacaagaaaaaggcaatgagccaattaaacataagaaaggcgagcgcataggccaaactgcctccgtaattcccgaaaagaggctgccatatcccttcgaacgatattgtcgtccattggagtttacggaataaccctccggcaatttcgctgaatatataaatcgataacggatttacgcctactaccaagaacggaaacgaccaacgcgtcctcttcgaatcgtcgataatataaatgagtgtcgcaaaaatcagagaggtgataccgcaagttaccaaaacgaaactcggagaccacagccgtttgtttaaaggagcggcatagctccacagatacccgataacgaacatcgatgtaccccaaaccgccaacttcacgatttgtgaacgtatctccttctctccgacgataacttttccgcaaagaaatcctatcatcacctgagctattgccggaatcgtactcaatatcccttcggggtcgacgaattgagctccgcccaaatacatatgagattttcccaacacggcataatcgaccatagagacaatattcccggcacatttctcaaatccgttcccgaaaagttgcagcaaataatacccgacaagcaaaacggcgataatcgtcgggaacaaacgatgacgaacagtcacagccaaaagagctacaatcccgtaacagattcccagtcgctgcaatacacccataatccgtaaattttcaagcgtattgtattcaccggtagcaataaacgccaaaatccatttgagggagacacccgacacgaaaatcaatgccgtgcgccgcaggattcgggcaatcgaaacccgccaatcgaaattcgatttattgagcgacaaataaatagagactcccatgataaacatgaaggcaggaaaaacaagatcggccggtgtaaatccgtcccatttcgcatgtttcaaaggagcatatgcatatccgcacgctcctgcattgttgacgagaatcataccgcaaacggtaatacccctcaacacgtccaatgaaaccaaccgtttagaagtgctcgtcaacgacatatccaatacattataatcgagaatagagttaacacggctccgataagtgtttcataaggaatcagtttcaaccggtctctaaacgtcaaatcgcaaacccctcccgtagcatggaaaaacgacccgtgaggcaaatgatccagtacggtagacccggcattaaccatcgccgcaccccatatcgacgaaacgcccactgctaaaatcgtatcggcaaaagaggcagaagccaacgtagctcccgccgtagtcgaagccgtagcggcagacattaaaataccggaaataggagcaatcatatcctttcccatactcacatgatccaacatggccaagatataatctttcaaagtcgaatctttaatcacaccggcaatagtccctgtaccgatcaacaacacggctatcaccgacattttctgtaaaccgaattcgatactcggcaatgcatttttccattgccgcatacatatcaatccgcacaatccacctgccggaagagctaccaaagggtctacggtgataccgcacaaaggtcgtaaagccaacaggaaaatagtcacgacgggagccaccaaactactccataacgaaggtaacccatcgtcgtgtcccatctcttcctcatcggtatgaaccttacgaggtttcaccgggaaaaaacgggctatcacgaacacggtaaacaacaaacctattatggccggtataatattggcaaacataaccgagggcaaatcggccccaaaattctcggccgcaataatcgtgttgggattgggcgaaataatatttccgcttttccctccacctatcatcacaagcagcagttgcggagtaggaatccccaacctccgaccgatagacaatgcaaccggagctaccgttatcaccgctacatcgataaaaacgcctaccgcacacaacaacatcgtggcaaacgccaaagccaaataaacacgtttctcaccccaaaacctgattatcgcatttgaaatagtcattgcagcccctgtttttatcagaacacccgacaatacccccgccgtcagaatacgcaacacagccgaagagacatctttcacgccctcggtcatcgacacaacgacttcctctaaggagaagcctccggccaaaccaccgatcaaagcgcccaaaataaggctataagccggtgaaactttcttgattatcaagaatatcgacaccagcaatccgattaatgcacctaccgtactatccatgtgtccctatttgaatggttcgcataatctgtgtgacgacctgccttatattcttcaaagcaaaatcccgatccattgcttcctgcaaagataccggagccgtctgtatggaaaaaatactggcaaatcccatctcattcaatatttcgcatgcctccacacagccgcctatggcaattaccgggacagcctcctctttcgcataacgcaaaattccgcccaacgctttgcccataccggtctgtttgtccaatttcccttcaccggtaaaaatcaaatcggctccctgtatcgtctccctgaaacggagcatatccaaaacaatatcaatccccgattgtaactcggcattcaagaatggcagcacgccgccacccaaacctccggccgcaccggctcccggaatttccgaaatatccatctgcctcgtctcctttatcacttgcgcataatgaatcattcccttttccaaaaaatcgacttcatcgggagaagcacccttttggggagcataaacagcggcagctccgcgactaccgtaaaaaggattatttacatcgcaagctatcgtaaaagaagtttcacacaacaatttgttagccgaagaaccgtccacccgggcaatcttccccaaactttcgccaacaggaggaagctcctcgccccgctcgtccaaaaaacgataacccaacgccgccaacaaaccgatacctgcgtcgttagtagcactgccgccgatacccatgacaatgcgacgacacccccgctgcaacgcatcggcaatcatctcgccggttccccatgtagtcgtgagcaaaggatttcgtttttcttgcggaatcaaaggcaaaccgcttgcagctgccatttccaatatagcggtcgatccatcagaagtaattccgtatgccgcttccatcggattcataagaggatcatgaacacggcacgatacccgctcgacggacatattcgagcaaatcgcctcgactgtaccttcacctccgtcggccacaggcactaccaccaccgcacattcgggaaacacgtcgataatcccctgccgcgcagaggctgcgatctcctgcgaactcgcacatcctttgaaagaatcaaaagccaaaattacccttttcatcactctcgctccaaaacattccaaagttaataaaaataagacctattcccctttatatcgttcgaccaatttaatcgcgctttgtaacggatcttcgaatgacgtagaggtattgtgccacggagcttttatccaattttcctcccaacggtccaaatcggcccgctgttccgaaaaatacaacttcatacggggaatataataatcctttatcaacccgctccaaaaccgggcggcataatcttcttggaaaccaccccatgtcgtaatcaaccgcttggcattagcctcataggcatctttctccaaatccgttttcccccaatcgcgggccatatccacccactcttccagtcgatacaacggatgcgaagccaacaacttatccacatctaaaagaatctcgaccgaacgatccaactgctgcatggccgccactcggttccccaaagaatcttctttcaaagcccgcttataacagtcatcagctttggcggccaaataataagaggcatattcaatggcatcattcacatacagcggcgacgattccaaactatcggcacacgacaaaaacagttcgacaccttgcaagaacgaatcgctcacgtccaacttactgattcggcgagtatccgggacaaccgtttgccaagtaaaccgggggtaagaatacaacgagctataaactgtttccctgaactgctgccaagcactatccatagccgccgggcaaccgccgtaacgagccttacaataaacaggcaaccaagaatccaaatctatcgaatcgcctgtccaacccatatcggccaacaattcataaacgacctcgttattttcaagcccttcgggagcagaaccgaacccgaccaaattaccggcattcgcactatgcaaagcttcggccgaagaggtcgcatacatctgcaaatcgcccgtcatcggagtctttcccccaaagttcggcacataactgaatatccattttttcccataaaaaccatcatgatttttccacgtttgttcagtgccccaaacccatttcggataatcgtttcccaaatcgataataatcattttatcgtcgggaaccctgctcaacaaagcctgcaagctagccttgtcccaaaaatcgtgttgatatccgaaagtccagccttgcgttacccaaacggcatcgggattaccggccgcaatcgaatgatatatagattcgccgtattgtgccaataacttgtgtttcccgtcatcgtcaccctcggcgacaggcaatttcatctcattgaaactatccgacagatagtaagtatttttcccaaactctttttcccactcttcgataaaaagttttcctatctccttaaagtagggagtctcgggaggcaatacataagcgttgtatttttcatcgaatccgccccattccaaatgtttgaattgtatctcggggtgtcgttcggcaaacgcagtaggtacaaaaccggcaaatgcaggagcaataggctccatacccagttcacgcattcgattcaatatcttgtgttgcagttttatctgctccttttgccaaccgtccgtaagcgggccgtcccaaccattcagattccccatacgatgccacggcaaatgtgccgggccggtaaaaaaagcccgtatatcctcttctttcaatcccattttcagccacactcgctcggcaatcgcctcgctcgctacggtagccaacggcatattgactccccgcagagccatccagtcgatttccttttcccagcgttcccaatcccaatacggagttgtataaccaaaggtacacacattcaagaaatatcggtactcatacggcgtagtctgctttttcaaaacaaaatcgggccaagtctcaggcaactccatacgctccccgctccatgttttcatcgccgagcaagcctctcgtaaataagtatggaacgcataacaaatagccaccgagctgctgcctctcaacgtgagaataccgtttttagcctctacctcgaaagtctctttcccattctcaggagctatctcctccaactgtatatcggccgctctctccccgatttgccgctcgattaaatcaaaagcgggttgtattatgccgtctttctcgaccgaagacgagttacaagcacacagtacgatacaaaaaagcacaaacaaactacttgatatgtggtatttcatggaattatttttttaattaaacctattaccgaataaaaatcgtgtcatgaaccacttacagacccgatattctataatatctcttgtaagaacagaagcaactcacgacacgattttcatgaacctatactctatctatcactttatgataagtttctgtatcgctttatcaacaacgatcaaataaacaccttcttctatcggcaattccaaagccgaatgattggctatgattccttcataaaccaatccgccggtcatactgtacaccttagcggtagcagctttatccaaccccgttgcataaacgatattcccattattccaaatgcgaacaacatcttttacatttcctgtgataccactcaaagaagagtactctacggctcccaccgaaggagtagcaggacgcgcattacccaattgatcgaccgtgggaatctccacgccatctaccacggcgatacctgcacccgaagcaatactgttttctgcaatcatcgcaaccttcatatcgcccgaaagaacactcgtctggtgattatagctctcatctccctcgtcccacggattttgttcggtagcggcgaaaatgacatcgctatcgaaattaacggctttattcgaaccgtcggcaaaaaaaccgtcagaagcagctacgtataaattgttcttgcaaaccggtaatacagtttggggcaaaggttggttattagcatcgacttgtcccgccatataaaaggcaactatatcgaatctcgattcgtcgtccatccacgtattgctataattttcagcaaacaaattgttcacgaaagtaggctccatagtagtggtagccttcgaccatacgcaaagcgcaccaccgttgcttcccaaattaccgacaaacgtacaatttacaataaccggagaaaaaacatcaacagcggtcgctgtctgcatataaatagcaccaccacgatcgtctgctatattattggcaaatgtagaattagcaatataaacacggggagaaggattctttgccgtcgcatttacacctatggcgccacccgctgccccttcattttccacgaaagaacaattttcaacacgcaattccgaatctccataagcacaaacagcaccgcctccataagaagcaccgcatctgtttttgaggaataaggaatttttcaaaaaagcattggaaccactcacccttatcacgccgccattattgactttactgctaagaggttcgtaattattcgaaaactgacagttattagcattcagtgtcgaattgccactcaatcggatagcaatattcttaaaaccgtcgatgataagatcgtttaatgaaatctcagatgcttcaccgaccgtaaacaacgattccaacccttttatggttactcgttttccattctttttattgataccgttaaaagttagtttctttcctttgatggcaataccggttccttcaccgtaatccaacacttctccatcgaaattaaactcgatgacactgcccgattcggcatgttcaatcacatacaccaacccaccggctgctaccgggtccatgtcggccgtcgttacttccaaagtttgtgcaaacatcgtacttgtacacaatgcaagtacacacgttaaaaatgtaaccttcttcataataatttaaaaatttaatggttaatatagatatttaaaactgctattctgataagcattagaaactcgaataacataaagtccatttcgagaaccttccggtaaaactatattcgttgcattatctacattttgtgtctttaccaattttcccgatatgtcataaatattcacctgagacgttgttttgagattactaagcgaaaaaccgtcggcactcctgataaggtttatttcctgcaaagaagtagcgtcatacactgcactcccctcggcttcgatagtaacgaatacaggtaaatgatccgatacatctgaaagtgtcagacccggttcttcggtaacgacacccgtctccgtggttgtatatttaagagaatcatcgggtcgataagagataatcatatctatgcacgacgtagggtccttagccgggtaggtatatagagccgtattgttcagtatcgaaaatccatactctttgaaagtcaccattgcccgataagtaggctgagcattgaagtcgccagcgataaagacagtcttatcactttgccgtgcaaagcggatagcccattctgtcgcagtatctcggtcatcggcattaagagaataatgcgtacaaaggaaatagaagttgtcaaattcggcaatgagaaaaccgcgggactccttgtctttcgaagtatccgatggggcaaaagactgggttttcaccgatataggttctgtcttcgataaaatacctatgccataataagtccccaccaaagcaaaaaactgcgaatgcatgccagtagattcggccagttcgcttaaataatcatgattaaagatacctaacgaacggttatcgacttcttgcaaagccacgatatcgggattttgcgtattgataatggtagcaatatcggccaacctcgatgaggtcatactatgacctttaatgttataagaaagtaacttcgtcgttccagccgatatagaaccagtacataaacttataaacaaaatcaatatcgataatataaatacccttttcataacaagaaattaatattttacatactccaattctgtcacaataggcaagtggtcggataaaacagactgaacggtttgagttctcacaattttccacccctgtttaggtctggcgaaaatataatctatctttctcttggggttccaagcgggaacagtaaaatcgtaatcggttgccaaaaaccaattttccaacatattatacttaatttcctttgacgaaggagctgtattaaaatctcctcctaaaaccacagggtatcgataatcattgaaatactcggtaataaaagcggtctgtgcttctctcgtctttggcaactgataatccaaatgtgtcgatgcaaaacaaatcgtatcttcgcctatttcaaacagaccctctaacagagctctacgttcttgcgctttattgggccacggcaaaaaagttttcttcgtatcgatataagggtatcgggaaaggattcctataccataatatccacccttataatcgattgttttcccatacacgccaaacatctttgtaaaatatgccaattccgaaatatagtcacgcccgatttgatgcggagctctctctcctctatcggttttacaatctatttcctgcaacgcaacgaaatcgggattgaaagactttatatgcgaagccagttcctccaacgatgccaattctccaaaacgaatattataggtcattacctttattctcaaagtgtcttgtgcatatacgtttccaaactggtataaaaacacgacaatcaaaagatatttaaatgctttcattttctacggttttgaaattttcaacacagaaataatagggagatgatcggatgcatttacccccgtaacgacagtatgagaaacaacattaaaatattccaaaggcctgtaagcgatatagtctatttcccgattgggcgcattagaaggaattgtaaaatttttcggatctgtattcgtcctgacaaatccggcagcttccaacttgccgataatcgaattatccggtttcgaattaaagtcccctcctaaaataataggaaagtcgcttttagaagaaagttcttccatcataacggggaattgtctatccctttccgcctgagtaacggataaatggattaccgccaaataaacatcgattccattgaactttatcttggctgtccccaaaacgttacttcccgtaatagtcagtccatctatctctttcgggagatcatgatttacgatttcgctcatttgaaaagaagaaaggatagctgcaccataagccccgccctgaaaatctttttgtttgaaaaaataataatacggataaccggccaattctgccaattctttagcctgatccacacccaaacttcttgtcgttttataatctacctcttgcaacaaaactacatctggctttttgctttttatcacattcgcaacgttattcacatctgcggttgttgtttcacccgatacaccataatagggtgcacagtgttttatgttataactcatcacgaccaggttttctttgggttcagtgttaccaccccaaccggcatctccttgcggttcattggctttactacaacccataaaaaccgcactgatactcatcatcaatataaacacacgtttcatcgtaatcatattttatagttcattaatatccacactattaggattctaatagtgtggattagaaattcaacttattccggccaaccgggattttgacccaacagaggatttttcattctttcctcataaggcacaggccacaaataatgcatagccggatcgaaataacggggacctccttctgctctcgatttttcgtaaatcacatcgccgaattcatcgactccggtatcgggataaggattagcgcccaaatcgttcatacaaacggttagactaggccctgtaatagcccgaccaaaacgcaattcaccttctctccaacgcattatatctgcatatcgcataccgtcgaacgaaagctcgatacgtcgctctctctttatttcggtccacaaatcgagattccactgttgcagctccttcaaatccattcgatgcatacccactcgatctctcaaacgattaatagtctcatcgatttcagtttgggtcaatgtcccgttcatcttataaagagcttctgcataaatcaaaagaacctctggataacgaattacgttcaaattggtgtgagacctgttggcatttccggcaatacttatctcgttgtattttttgaaataaaagccggttatcccgttagctccgttccgtccgggttgtaacgacgagaagcgtggtaactgaaatatatcgttcggccggcgatattcggcatctccatcgtcaccgccaccccattgatcaccgggagtaaacaacgtcattctcattctcggatccctgttttggaaataatcggcataatgttcctcaggatacttatacagaggtgacgtttttatatctgtacgtttataatactccaatcccggcttagctggcataccatcgatacataaataagcatcgaccaacgttttggtaggattaaatcgaataaaatccaccggcgaacaagtctcgttcgacatgttattattgcgaatatcattcacatagatactggaaataattgcttcgttattatctggattattctctatatctccttcgagatgatacaatttttcataatcataaagatcgtaggggccattgtctataatctctttggcagctttggcagcaatatcataacgttcgttttgaagggcgatacgtgctttcatcgccaaagctccccagcggtctatacgacctacattatctcccgtttgcctttcatgaggtaatttcgaagcagcccaatccaaatcggtcattaagctatcgataacttcacttcgtggagtacgaggtccataagctccttcggacgtaataacatggttaatccagggaacatctccaaaaaaagtcgtcaacataaaatatacccacgaccttatgaccttcacctcggcggcatagacatctttaacatcttggtcgatttcggcccgattgtaattatctaggaaattattgcaagtgtgaatatgtccgtaagaatatctccaatacgaagtaaaggggaacccatcggtataagcatgtttccctcccgatacttttgaaagtccgctgtttttatcaccccatattacagtttcggccgtagactctgcccatttaatcaacaactcatattcaaatgtttcataacaaggatacaatgccgcgcgcaactgctcctccgtcttccaataagtttcattagtcacggaatcctgaggatatctgtctaaaaaatcatcgttacatgaaaccaacaatgatgccaacggcaaaaaagccgcaatatatttaatcgttttcatattcaatggtatttattaaaatgaaagaactaaaccgaatacgtatgtctttacttgggggtaaacatcgcccgaagattcccgtacttccggatcataagcaccgaaatatttagtgaatgtcagtaaattatctgccgacgcatacaatcgcaacccctctattttccatcgattaagaagttttttgggaatagaataacccaattgtacatttttcaaacgcaaatacgaagcatcttctttccaataatcactgaataataaattatgagattgagcttgatacagtctaggatatgtggcatcggggttgttaggagtccagcgatccaaatgttctaccttaggaatagaataatcgttgataaaacagtgacgggcttcatctgacagataaccatttactttccccactccttggaaataaaaactaaaatcccaatctctccattgcaactggcctctcaatgaataggaataatgcggatacggatcgccaaatacaaccttatcatattcatctatttctccatctggaattccaccgggtccagaaatatctcgatatttaatatctcccggttgtgttatagcttctgccgcttttggaatagcgaacttaggattaatatactttccattactatcgacaccgccaaagtcatcaatctgcgccaaaccatcggtcaaataaccataataagcgtcgataggatctccttctctacgaatgttattggttaatcgaggttcactcgttcctaaatcgacaattttattcttggcatcagaaagattgaatagcaaattatatttcacttctccaatctggtctcgccaaccgatttcaagctcccaacctttattttcgattttacccatgttttcataaggcaaattagccgttccggtgattcctacgaccgtaggataaacaggtttcaccaatgcatcgatattatctttcttaaaccaatcgaaagaagcggtcaacctattattaaagaaagtcaaatctacaccgacattcaacattcttatcgtttcccacttgatattggcatttcccaatttactttgttgaaaaccgatattctgttttcctccgatcggataactttctcccgaatcaataggagtcaaatatggataataatcgctacccacattctgatttcctaattcaccccaagaagccctcagtttaccggaactcaacacaggttctgcaaactgcataaattcttctctggaaaaattccaaccagccgagaaagatggaaaatatccccaacgattatccctagcgaagcgagaagtaccatcgatacgcatattcgcttctaccaaatactttccatcaaacgcataattcacacggccgaaataagagcgtaaagcccaagaactcttcgtaccgctattcgtaatatcctcggtccctgcatcgatcacataaatgccatcaaatggtattttcttacgactcgcgcttaaactactgaaattataccactcttgcgaatatcccaacaaagccccgatctcatgtttattgatctgcttctgaaaattcaatgttaactgtaaggtttgagtcaaagcatcttgatgtgcttggctcaccgaatttctcatatttttattagcaggatcgggagtcccgtctgaaaaatattccggtaacgtaggagtaaacttatcggtttctctgaaataatagttcgcagcatattgccctcctaaattcaaaccgtcgattatacgcaaatccgcactcacgatagtattcaatgtacgagattttctcttttcctctccaccttctttggctacataaacaggattatttatactcccgctggaccaatattcggtgtcttcccataatcccatctcattttgttgttgccatttcaccggtaacagcggagacatacgttgggctaaacgaaatacaccaccagtacccgaaaatccggacgcattacggtaataatcgacaaaactgacattcccgtttattttcaatcgatcgaaaacctctgtattcacattgattcttgcattgtgccgttttgttttaaatgcatcacccacaaccaatccatcttgatctaaataaccgtaagacataaaatagctgcttttctcgcttccacctcttacacttaccgagtgactcgtttgcaacgcatgtttcttaaaaatttcattcacccaatctgtgttcgaatattcattgggatacattcccgaatcatatttttcaaaagcatccacatcataaggtctggaaaaaccggcggcagacattgcctcgttagacaactccatatactgccggcctgttaccaattccggcaaagcggtaggtgtttgcatacccacatatcccgaataggtcaatgtagccttctcctttcgtttgccctgcttggttgtaatcaaaataaccccgttggccgcacgagctccgtaaatagcggcagatgcagcatccttcaaaaccgacacactctctacatcattgggattcaataaattcaaatctccacccgaaactccgtcaatcaatataagaggtgcggtactactatttatggtactgacaccacgaatcgttatcgaaggcacggctccgggctgccccgatgaagacgtaatgctcacacccggcaataagccttgtaaccccgcactgacattagcgacgggacggttttccaattcatctccttttaccatagatacggccccggttacgttcaccttcttctgtacgccataaccgacgaccaccacatcgtccaaagaaacagaactctccatgagagaaacatctaacaccccggcctgcaatacctcttttttcgtttccttatatccgacataagaaaatttcaaagtactacccacgggtgcgtttaacgaatatttaccgtccaaatcggtactggttcctttcgatgatccctctacggcaacagacgctccgataataggctcgccggtcacttgatctacgacagtacctttgaccgatacgatttgttgctctttcgatgcagctcccgaactgtcttgttccttttgattgtataaaagaacactattatccaagaaacggaatccgacatctgtacccttaaatagttgggtcagcgccgtctgcaaactcacattttcgaccttcaaggaaacggtcttgttcgggtctacaaattccttactatatgccacatttacaacagcttgctcctttatctgttccatcgcttgtttcaatgtaacattctgaatgtttaacgagattttctgttgctgagcataagcaacccacggaaaagcaagacaaagccctcctaccacacaccactttctgatgtatggaaaaacgtatttttccagcataaattttgagtgtttgttaagttattagactaattatttttctttcacagcatatacattctccgatatttcattaaacttaattggggtaatggcagacatcatttcaaaaatacctgacaaattgtttagcttgcaggtgaaattatatgtgaacgcagctatcttttcactgcggatatcaaaagaaacatcaaattgccgagacaatgtagtcaagacctcttccaaaggagcatttctgaatatcaatttattttccttccaaacagaagcatctttataatactcgttcttcatgactttacaaagcctacttcctttttcataaattgcagtctggccgggagccatctgatatgttcccgatttttctgcatacggataacttatcactatacccccttcgtccaacgtggtcgtaaccaccgaatccgtaggatatcccgatacgttaaaactcgttcccgttacacggatattcatttcgtctgcctgtaccatgaacggtttagatatatccttctttacttcaaaataagcctcgcctactaacgatacttctcttttatccttcgcaaattgctctggataaaccaacttcgagtctgcattcaaccacactcgcgttccatcttcgagcaatacgaccaatcgttctcccttcaaagaacaaacctctttatagacaggcttcgataaatcgatattctgataagccaaatatccgacattcaacaataccaatgcaatggcacaagcccatttacaaaccgtccagacatttcgtctttcgcttcgacctattctctgcgccaaactttcatatacgccgaatttatcgaaatccggcacatcgcatcctcccattggcaaagattcggcatttaacagccggtttatatctttgtcgatatgcccggatatatatttcaatatctcagaatcggtccgatgtcgttttctaaaatgcatgtttcattggctttcattatataatactatataaatttcaaaaagtattatatacagatcttacattaacttattttaagcattacatcaaaagggaaatagcacacttacgaacaatctcctttatctgtttcagagactggctatactggaattttattgtattgacagaaagatttagcttatctgcaatttcttggttagaatactttcccgaaattttcaaagaaaaaatcttcctcctttgaggagacaactgttcgatagcatggcgcaccaagtccaattgctctttatccatatcctcatcgtcttggttgcccccgtctatacgctccaataactccaaacaatcgtccaaaacaaagatatgattcttgggatcgcgaaggatagtaagtaaatcgttttttaaaacggtaaataaaaaatgattcaatgggcgactctcatcgagagaggttcgtttaatccaaactttcatgaaaagattctgcacagcatcttctgccagttctttattacacaaatatttaaacgcaagtctatacacctgttccgaataagtgtcataaagaatggtaaaagctaactggttaccctgttttaactgatgggttaaagcgctatcgtccatttcctattaatagaattctaagagcattgcaagattgaaaaaaatattgaaatagcaaaagaatttcgattaaaataagtttgatataatattacatctatatgaaaaattattatataaatccattgtccatatggctttcgatccaatattcacgttatatttgtaggacaaattatacccaaatgaattacttagaaacagagagattaatattacgaccatttgcagaacaagacacagaatctctgttcatcattcttagcgacgtagaggtaaacgcttttctccccatgtttccattaaaggacatcgaagaagcaaaaacatatcttcacgagaaacatacggcaattaattcggggaaaaccctgttttactacgctatttgtttgaaaggtaacaatatacctatcggatatatccatgtaagcggcggtgatagctacgatctaggttatggactaagaaaagaattttggcacaaaggtatatgttcggaagcctgccgagtagtcattgaaaaactaaaacatatcgaaataccctatatcacggccacacacgacgtaaacaatccaagaagcggaagggtgatgcaagccatcggtatgaaataccgatattcctataacgaattgtggcaacctaaaaacaaatgggttacatttcgaatgtatcaactcaacttagacggtcaagaaaatagaatttataaaaaatactggaacaaatatcctatccattttgtagaaacaatccctaaataatacgccaataatccaatggttcaaggtgcaatgggagaaattacagcaaagtctgctcaattccatacagatagagaagaaaaatagggtattcagaatgtaatctgatagtatttgactggatttcaactaaaccgcatatctttgtgagtggattgagggaactctctccaagacactttaaaaaagaagaaacgttatgtttatcttataggtgaaaatgtaggaagttttcaaaccgatgcaagagatagcatagtggttcttacgcatatagcgtggactgctattgttacatctgcatcaaagatttcctacggccttcacttagacgtgacatagttggctcacgtttttcaatctgtaaatttaataacccgacagagccaatagggaattgtgcggatatgaataaacttatcaattcggttcttttaattacgtacctgtttattgtagcttgcagtgatgataatattgaaaatacaccaacaccattcattctcgaaaaagactactatgaaatacgactagaacgaagttccacttctatttcaatcacaaatggcagcggagacatcagcttggacatagaaaatgaagacgtattacaagccatttattcgaaatacaacgatgattgggaggaagataacctaaaagggcatatcaatctgtatggtatgcagaaaggagtcacaaccttgactattattgacaatgtaacaaatgatgtggaaaaagtagaggttaaagtaacggactgctatttggcatatactatatccgagagcaattatccagcactggaagccaatacaacgctctttttcgtaaataaccaagaaaaagagtgctatattttcgccatagacaaaattcacggacggttatctgaacaaccgatagcaaaaggcagctatgagttttttgtcacacccgacgatgccctacctcaatttaatggcattcccggtttacatctaaatattacagataatgacgccacgacaaaatcttatgactttcagatcaatgcaaactcctcacaagtattaagtgttattcaagcctatttgggcgtagagtggggcaaactcttcgatagtgtacatacaaaaagtcctgcgccgatagacatgactatgaaactgactattcctaatacagattatcaaattacaggaatgttaagcactacatctataccagaacatatattggattgatgcatcgctgtggttaagcagttaaacttacatatcctataaagcaaacgagagaaaatgaaccgattgttcttttcgtttgctttgtttttatcaattctctttacaagcaaagataattggtcttaaatactgctctacgcgtggggaaaatatggggcctaatatgggaaaattttaggcaaaataaaaagctaaatgatgattgctcaacacttagcttttatctttgtacccagagccgggatcgaaccggcatggaggttaatccactggtgtttgagaccagcgcgtctaccgattccgccatctgggcttaaatgcggtgcaaagataaaaacagattttgaataagacaaataatctctgttttttttcaaaaaaagttattcgagctatctttctaataaaaaatagctattttagcagaagaattaacattaaaaaaacgacacgactatggaaaatagatattgtgtaatcatgggaggtggtatcggaagtcgcttttggccttttagccgaaacaacagacccaagcaattcctcgattttttcgggataggacgttcgctcctccaaatgagttatgacagatttataaaaataatacccaaagaccatatattcatcgtcacaaacgaaatatatgtcgatttggtaaaagaacagttacccgatatcgccgaagaaaatattttgctggaaccgacccgaagaaatacagctccctgtatcgcttgggcctcttatcatattcaggctctcaacccgaatgccaatatcgtcgtagccccctcggatcatctcattctcaaagaagacgaatttgctcaatgcgtcaatcgcgggctcgatttcgtatcaaaatatccggcactgctcaccttaggcataaagcccaatcgtcctgaaacgggatacggatatattcagataggcgaagatgccgaagataatataaagaccgtaaaaacatttaccgaaaaacccaatctcgaatttgccaaaatgtttgtggagagcggcgaatttttctggaactccggtattttcatttggaatgtacagacaattatcaaagcgttccaacggtttttacccgatatttcgaaccgattcgaagaaaacatcaaagtattcaacacgcccgaagaaaaacattttatcgacgaaaatttcgcagcctgccccagtatatcgatagatttcggtatcatggaaaaagcctcgaacgtatttgtgctttgcgcagaattcgggtggagcgatttaggttcttggagtgcgctgtacgaccactcacccaaaaataaagacgaaaacgtaacccaaaactgcaaagcgttactttacaacacaacgggcagtgtcatagccgttaagggggaaaaattggtcgttgtcgaaggacttcacgattacatcatagccgaagccgataatgtgctgctcatctgccccaaaagcgaagaacagaaaataaaacaattcgtgaccgacgcaaaaatggcttatgacgattcgttcatttagcatgctggcaaatcataaaaataaagaagcccggattgtaccgggcttctttattttcgtcaaacgactttatttagaagaacttcgtgggatttccccaaatatccgaaagtaaattgttggccaaacggctggctccgattctgaaatattcgttagtcaaccatttttcaccaagcacttctttcaccacacaataatacttcacagcatcggctgtcgtagaaattccaccggcaggcttaaacccgatcatcgtcccggtctgctcataatattccttaatggcctgacacatcacataagcagcttcgagagtcgcagccggctcgctcttacccgtggaagtctttatgaaatcggctcccgagtatatagacaacaaagaagccttcttaatattagaagccgtttttaaggctcctgtttcgaggatcactttcaaatgagcatctctacaagtttgtttgagttcttcgatttcttggcacatttcctcgtaatttccgcctaaaaaattacccacattgatgacgatatctatttcatcggctccatcgccgagagccaaagccgtctcggctactttcacctcggtaaaagtctgcgaagtgggaaaaccaccggacacggcagcgatattcacagaagacacatcgagattggcgcgaaccgtacccgcgaaattaggatacacgcaaatcgcggccacactgggcatctccggatgctcctcttcgaaatcgttcactcgtttggtaaacttagtaatcgaatcggtattatcctctgtatgcaacgaagtcagatcgatacagctgaacaaaaacttatatacatcgggagtactgttcgttgccaaattatcccgcacgatcttttctacggccgctgccacttgtgcatcgtctaaatcggttttataccgactcaacatttcttcgtatctatccattttttgttaatttaggattgttgatatgtcttgttttatctctatttgtcttcttctccatattcttttcaaaagcagaggtcaaatctacccctgtctggttggcaaggcacagcaatacccagaaaacatcgcacaattcgtccgataaatcgctgttctcctcccccgatttaaacgactgatcgccgtaccgacgggaaatgatgcgcgccacctctcccacttcttcggtcaatatagccatattcgtcaattcgctgaaatatctcacaccaacgcttttaatccatttatcgacctgttcctgcgcttcttttatcgtcataagatcactccttgtttttcgtatccatacaaatcgttaccggcccgtcgttcacgagctctacctgcatgtcggcgccgaagacacccgtagccaccgttttggaaatttcctccgaaaaacgacggcaaaaagcctcgtacatagggacagcgtgctcatgtccggccgcccggatataagagggcctgtttcccttcttggtcgatgccattaacgtgaactgactaacaatcaacacatctccgttcatatcgattaaagatcggttcataaccccgttcccatcgtcaaagatacgcaaattggcacatttcttcaccaaccattcgatatccgacgattcgtcgctatcttccactcccaacaatatcaaaagaccggcttctatggaggaatgtaattctccgcctatccgcaccgaagccctcttcactctttgaacgactactctcataggaaattcatttcttatcatgcaaagatagagaaaggagtgtacaagataaaacgaatacactcgtttttcattccgaatcgcatcctattttcgcattagacaaagataatgtaaatccaaaacagaagcaaacttacttgatcatacgtagtataacgactttcaaagccattcataaagggactacaaattaaaaatctgaaaatcaaataattatagtttaaatcaaatatttttttatgattttagctttcgccgtccccacgactgccatcaaatcagattccgaagcctccttaatccgtttcacactcttgaaatgagacagcaacaaatcccgactcttggggccgataccgggaatggaatctaacgccgacttcacctgccctttactccgtttatttcgatgaaatgtaataccgaaccggtgagcctcgtctcgcatgtgctgaataactcgtaacgactccgaattcttgtctatataaagaggcaaggaatctccggggaaataaatttcctctaaacgcttggcaatacccactatcgaaactttacccctcaatccaagagcgtcgatcgactccaaagccgcactcaattgccctttcccgccatcgacaataatcaactgcggtaactcctctccttcatcgagcaaacgacgataccggcgataaataatctcacgcatggaagcaaaatcgtcgggccccacgacagtcttaatatcgaaatggcgatagtcttttttcgatggtttcgctttcttgaacaccacacaagaggcgaccggattcgtaccctgtatattcgaattgtcgaaacactccatgtgccacggcaattcgggcaacctgaaatcctgttgtatccgggtcaatatccgcatgactcgctgttctggattcagcttctcgctttgtttcaatcgatctaccttatattgcttcacattctgctccgataccgcgagtaattttctcttatcccccctttgcggaacgacaaattcaaggtcaacaaaatcagactccggcaaaaacggtacaagagcctccttagcccgacttccgaatcgggaacgtaattcggcaatacccaatgacaaaatttcagaagcagattcatcgagctttttcttatactcgatagtaatactttgtacgatcgagccgcctcgcacgtgcatataattcacaaaagctaccccctcgtcctcatcgtaagaaaagacatcaatttcgtgcaaagccggattcacgataaccgatttagctttatacttctcgattaaatcgtatttttccttaacaacctgagcttcctcgaagcgcagctcggcagacagagccgacatctcttccaacaaatggttactcaattggtgtatgtctccgttgagaatctgacgcacctgttcgatatatccgttatattcttgttccgatattttgccgacacaacaccctttgcaatttttaatgtgatattgcagacaaacccgaaaacgatttttttcgatattttcaggtgtcaatgcataattgcatgtgcgaataggatataattctcgaattaatcccaacacggttttcgccaagtgtacattggcatacgggccataatatttcgacccgtccttataaactttgcgagtcagaaacacccggggaaaatgttcgttccgcaaacaaatccacggataagtcttgtcgtctttcaacaaaacgttataccgaggcttgtatgctttgataagactgttttcaagatgcagagcatcctcctcggtcttgacgacaatatattgaagatcataaatatttttgacaagaatattagtcttaggcgaatcatgcaccttattgaaataagaagacacacgacgtttcagattcttcgccttacctacataaataatctttcccgttttatcgaaatattggtatacgcccggggtatccggtaaaagggcgagcttattcttaatattttcgtttttatcgatcaatccgtatcaatattttatcagagattcgatttccacatcgttcggaaataaattccgtcctttcaaaaactccaattcaacgagaaaattgacatagactttcttcgggttgaatcgttttaccaaattataagcggccaacatagtcccacctgtcgccaacaaatcatcgtgcaataaaacaacatcattttcacaaagggcatccttgtgaatctctatgacatctacgccatactctttggtataactttcctgccaagtttcagcaggaagctttcccggtttgcgcataggcacgaatccggctccgatacgcgtcgctaatataggccccataataaaaccgcgagactctatacccactactttcgtaatacccttttcggcatatatggcagtaagcatatccgacaattccctcaaacaatccgcatctttgaaaactgttgtcaaatctctaaaaacaattcccttttgagggaagtcaacaacatcgcgaatcttacttttaataatctctacactcattttatttttattgttttattcgttctatccctttatttaaaggctttctagcgatttgtttcacgtgaaacattaacgtcccaccaacagcagcaatatatttatatcgctcggcgaaatacccggtatgcgcgaagcctgcgctatggtctcgggatctattctttccaatttctgacgagcttcggtcgataatgcatgtatctggctataatcgaatttccctcgtatgcgaatatgttccaaacgagaaattttatcggcaatcattttctccctatcgatataaccttgatacttcatcttaatctcggcagcctccacaatttcttctctgcgattctttataacagaaatttcttgtttcaacgcaggaaccaatgtcgaaagtttggccatatccaactggggacgtaatatcaaatcgatcaatcgcaccccctgtttcaagggagctgttcccagagcttccaaaccttcgtttatataggccggttttatagaatagttttgtgcaaaccgaatcaaacgatccacgctatcccgtttcgccgtcaacaaatcatatcgctcccgtttcgccaaccctaaccgataagctcgctcggtaaggcgcatatcggcatcgtcctgacgcaacaaaatacgatattcggctctcgaagtgaacatacgataaggttcatcgacaccttttgtcaccaaatcgtcgatcaaaacccctatataggcttcgtcccgccccaatgtaaacggagcgcctccgtgacaattgatatgagcgtttattccggcgataagcccctgtcctccggcctcttcataccccgtcgtaccattgatttgtcccgcaaagaaaagattggaaatctgtttagtttccaaattatgatttaattgtgtaggatcgaaataatcatattcgatcgcataaccgggacgatatatacgcacatctcgcaatgccggaatttcttgcaacgcctttatctgaatatccaaaggcaacgacgaagaaaaaccgttcaaataatattcctgcgtagtttccccttctggttcgagaaacaactggtgttccgttttatcgggaaatgtcactatttttgtctctatactgggacaatagcgaggtccgatactttgtatctgaccgttatacaaaggcgaatcgggcagacctgcacgcaatatatcgtgtacttgttcattcgtataaatagtccaacagctacgttgtttcaacggacgaggctggaaatcgaggaaagaaaacttgtgaaaatcgtcctctcccctctgctcggtcgcctcttcgaaatgaatactccggccatcgattcgaaccggtgttcccgttttcatacgtccggcggtaaaacccagctccacgagctgctcggtaataccgtacgatgccggctcagagatacgccccccttgcagtcgggtacgaccgatatgcatcaaaccgttcataaaagtaccggtcgtcaacaccacacatttcgccgtaaacgtcacgttcatatccgtcaccacgcccgtcacgcgcccgtctttcacaagaatctgattaacagagtcttgccacatatatagattctccgtattttccaaaatagagcgccaagtagcaataaacttggttcggtcgctctgtgaacgaggactccacatggccggacctttcgagcgattcagcattctgaattgtatcgccgtctcatcggtcacaatccccatgaatcctcccaacgcatcaatctcacgaacaatctgccctttggcgataccaccgaccgcaggattacagctcatctgagctatcttattcatatccatagtaataagcagggttttcgaaccaagattggccgaagcgcacgccgcttcacacccggcatgccctgcacccaccactatcacatcgtaattaaaatccatcgtatattatttctccatgacttttatcgagaaagaaccctcccccgctacatagaaatcagaaatatattcaatcacctcagcttcaaagcctcgttctcatgacgagtcatcatctcacgctcacccgggcctttatcgttgataccgcacaaatgcaaaacaccgtgtatgataatccgatgaagctcttcgtcataatcggttccgaactgttccgcattggaacggacagtatccacgctgataaatatatcaccgcctattttatcgccctcggtatagtcaaacgtaatcacatcggtataatagtcatgctgcaaataagccttattcacttcgagaattttctcatcggaacaaaagatataggctatatcgccgcatttcttcccataccccgaagcgacacgacgtatccaatcggtcgtttctctcttttttatcgccggcatcttgacgtcttcggcaaaataactcacagccatgactttatctcttttatcttataaaacactcgcaacgcacagctacggaggccgaatcctcggttatacgaggtacgaacccatttccgcatactctgcaaagatagtgcaattctgcgaataagaattacttgaagaagaaataagaaaccgtaatagccgaaatagcccctatcacatcggccagcaaagcgtagccaaccgcatagcgggtcttacgcacccctacgctaccgaaatagaccgccaagatataaaatgtcgtgtcggtcgatccttgcacggtacaagctaccctacccacaaaggagtctacgccataagccgacatcgcatcgaccatcatacctcgcgaaccgctaccgctcaacgacttcatcaaagccgtaggcaatgctcccacaaattcggtatctattcccaaccaaccgaaaaccgtagcaaaaccctcgacgatataatccatcgctcccgatgcccgaaatatcccgatagccacgagaatagccactaaatagggtatgatcataaccgccgtcttaaaaccctctttcgcgccctctataaaagcatcataaacattgattcgcttgacaaaccccgccacgataaaaattacgataatcgtaaacagaatactgttggctgcaaaagccgaataagacgaaatcttctcttccggcaaagaggagaaataataaaacaccccgcccacaaaagcggtaagccccaatccccatagcagaattacccggtcgaatatattgattcgctgtttgatacacaatgccaaaagccccacgaacgtcgccatgaacgtggcgattaaaatgggcaagaaaacgtccgaaggattggctgcccccatctgtgcccgataagtcatcaccccgataggaatcaaggtcaaccccgaagcgttcaaaaccaagaacatcagcatggcatcggtcgccgtgtccttcttgggattcaactcttgcaactctctcatcgctttcaatcccaatggagtagcagcattgtccaaccccaacatattggcagaaacattcatgaacatcgaccccaaagccggatgccctttgggaactcccgggaaaagtcgggaaaacaacggactgatccaacgcgacaaaacagcgactaccccaccccgctcccctattttcataagtccgagccacaacgtaagaacacctgtcaaacccaaagaaatatcgaacgcgctacgagccgaggaaaacgaagcattcataatatcggtccagattcccgtgtttccatatacgaaagtctgtaccaccgccaccacaaaggcaataacgaaaaatgcgatccaaatgtaattgagaaccatgccgagactgttttcaaattatctttctaaaaaacgaacatagcacaaaccctgagtaaaaacaaatttacttgacgatgacaacacgtaatctatgtttcgcagcttcactacaaaaatagtcattttaagcaaaccaactctttttctttccccaaaaaaggatttacacccaacccaaagaaccgacaattctatttcttcctgattcccgcattccaatttttatcatatacaactatatatcaatcatttattcaaattttatcttcctgagaatcgaatattttccatcaccttgccgcctatccgcaaatttttcaacagagtcctttaaaattaacatctaaaaacattgtcaaaaacaactattatcataaaaccgaaagagaaaatttcagccaataatttacacattatttttaactttatttcaacaaattaaaatccacacccgcaaccttatattaaaaattaaatttgaacaaaagaaaaatttgattccgctacatgcaatttttatctttgtaaaaaatcaagcatcttcaatcatgcacacagcacaagacatagagcaagcgattcgggcggaagccaaccccgacaaagtaaaaaccctctctggattctttaaaaccggaaaaggagaatacggcgagcaagacatattcatcggcatccccgttcctgtaacacgcagtatcgtcaaacaatacttagataccccgctcgaccaactcgaaatcctgttacataacccggttcacgaattgcgcatggccgccttgttatgtatggtcgaacaattcaaaaaagccgatgccaaccgtcgagaagcgatataccacacctatttatccaataccgcatatatcaacaactgggatttggtcgatttatccgcagcacaaatcgtcggaggctatctcgaagaacaagaccacaccccactctatcaactggcccaaagcagcctcatctgggaacagcgcatttcgattgtctccacttggcaatggatccgcaaaggccgcttcgacgatacgctcgctattgccgatattctcttgtacaacaaacatgacctaatccgcaaagccgtaggctggatgctgcgagaggtcgggaaaaaagataaaatccggctctgtactttcctcgacacccgttatcgcgatatgcctcgaaccatggccattgaaaaattctcgcccgaagaacgacgacattatatgcaaaaataacataaacaacgcacggccatatacaggccttgaatgaaattccaaaaatctatcgactacaatcccgccaccctcaatgaaggaatttaaaatgcatctgtcctttatctgccccgacgacaacgttacctcataactcggttcagcctataattagtgaggatatcgactcaatagaaatcaaagggaatcgtctttcaaattctctcttgtgttcgcgggtagaggtaaaaagaatattcgaagcagcatcttagtcctctcctcttgccgtggtggctcgtgatattacgaaggaatcgcacgtaaatcgaagcaggagcgaaggcagaaatacatctcaacctctccctaccgtgtcccgtagcattgcggggcactatgttagccatatagaggagacaccgaagaaacaatagtttgagttgaaaaagatcatttgattgtagagttcaaccccctcgctctgtgggcactcctcctatattccttgcaggaacaccccgtaatgctacggggcacagcaaagggaagagggagatacactaccctattcctgttatcgaaagcattcacacttctcccttgtgttttgagcaaaatataggggagaaggagtaatacactctgtatagaaatttaaacaagaatcaaactctccccaaaagttcggtacgcggttatctacaaaaattccatagctaaaatacatatctacccctcggattctctactgaactcacagctcaggtacaccggcttaccctttactcatttcacaaaaaaacgggaacttcgtgaagttcccgtttttaaacacatgatgaattctattatttaataaccaaacgatggttgtgttcgttgccgtttagagtgatacgaatcagataaattccgggattcaaaccttccacagaaacagattgtgcaggcatagcgacctcttttaccaagctgccttgcaaatcataaatagcgatattcgaaacaccttccgtcaagttgatattgccttgtgcaggattaggccaaaacaatttctcaacagctacacgctctatcgacgtggctttctccacttcataggagccgatggccggattagtcgccgaacgagatttgccgcgttggtccactgtgggaacaccttctaccacaataccggctccggctgcgataccgtcggctgcaatagcgatatttttggtcgtaccctcattgagagccggaataggttcatcttccgcaaacagtttctgatcggtataaactacattatccacaaattcgtcggtggtcacaggtgtaccttccaaagccgtaccatatatattgtgagtacccgaaataacacaatcgttatgagtataaatatcggggccaccgatacctcttacaagaatagaattatagatttgaacgattgctttggaagctatatggattcccgacccataggtttcatgtacactcttgttatctacaaaagtacaattataaatagtagcatctccttgtaaagccaaagctcctccaccattatttgctcctgtaatttcatttttataaaaagtacagttggtaaacgtagcatttttagaagtagataggatagctccaccatgtgctgccgataaattctccccgaaataacagccagcaaccttataggtaaccgcatcctttaacgaagcataccatgcaccaccagaagtacccgtagcttcattatgctcgaaagaacaattctcaacagtaacatcacccatccaagtcaataatgcaccgcctcccttagccgcattattcataaatgtcgtgttgacgattttcaaagcgccatcggttacattattattctgttctactgctccaccataatttgtcgctgtattttcggtaaatgtacaattagtaaaacgacctgttacacctttattggtatataatgcacctccggctttcgttcccgataggttttgaaaagtacagttcgtaagcgtaatatcgccgcatgccataataccggcagcataaccatttttcgccttatcgaaaagcagattctcaccggtaagcgtaccgtttgcacctaccaaaatagtagccgaccaagtagccatagtcgtttccgtatcgaccaaagccgtaccgtcaccaccgtagagcgtacagtttttcaacgtaagcgatattaattccgctccatcttcgggttcgtaaagcccgattttaaaaatacgataattagagactcccggctcggccacggaaatcgtttttcctttaccgtcgatagtcaggtttttgtctatcaaaatcgtttcgggaatcgtaacggtggtctcatcaccgatagacagctcgatgaccgacccgcccggtgcattcgcacgacataagggagagttccttcttcgtctgcacctcccgatgttttggtcactaataaattttcggcaaaagccgtacccgaaaacaaaaatagagcacagctcactaaaagtaatttgtttttcataataacactttttagaattgataagaaatgaaataattatttttttgcaagtataatatttttttatttatatacaaagtatttcgtttactttctttctaaattctataattttctatttgaatcaaaaatgaaacataaaagaaaaagaaatgaaacacaaacacaaaaaaaggagtggcgattgccactcctttaacccttacgatagaaaatctattatttcttcataacttctgccaccttttccttcattgcctcttcgcgcaaatcgcgagcgacaatcgtaccgtcgggagcaaacaaaatgatgtgagggattccttgaataccgtataattcggtaggaatctgctgtgcattaataatctgaggccaaacgattcccagttcctttatagctttttgagtatcttctactttatcccaaacggctacgcccaagacatcgagtcctttactatgatatttatcgtacaactccttgatattaggaatttcggctcgacaaggaccacaccaagatgcccagaagtctaccaaaacatattttccttttcctacataatcagaaagcgaaaccttgctgccgtccggttgctcgatcgtgaaatcggtaaacatagcgccttcggccgtctttttcaatatctcctgttgctgaatcatcatttttataagcggattggccttcaaagtttcgccggcgagattgagcacggaatcgaattgagccggttccaaattccagttggcaatagcccatgcacctacggcattatctttatttctatcgaaattctcggacattactcggttaaattcgggcataatagtattcgtttggaagtcttgccaagcctcgcgaagctcttcttcggacaatcctttctgcataatttcctgttgtttggcgataatcgtattctgcaaagaatccatatcggacataaacaaagcgaaactatcgttcagaggagtacccgaacgtttatcggtctctcccatttcaacagcgatatcgccgttttcaagaaccaactccatacgatacggacgtgattgtatctggcaaatcaatgcggtatccgctttaccggtaaatgtaaacttaccattggcaatcaccgcgctatccaatacattacgggatgccatatcggtcaaataaactttatttccgttcaacgttgtatcggaaaccattccgttaatcgtgtaagaagacggatgcgtaccacaagacacaaccgttgcagccgtaacggccaataagaaaaaattactgttcttcatatttatttttattgataattgtaaaaaaacgacgcaaaacgaaaacaacggcgagtttgtccgatcaagccgagtgtagcctattttcgcgcttattgcaaagatagatatattttaagaaaaaacacacgatttactttctttaagcattcgggaacttccccggcaacagactatacattaaagaaatatttccttattagcttgtttattccgcatacttcatttaattttgcatggtgtaaatttgcataaatttcatttacaacaaataataacttaaattcaaatcctatgtggttaagtaactcgtccataggacgaaaagtagtcatgagtattaccggactctttctcgtcctatttctaacgtttcacatgtgtatgaacttagtggcgttaatcagccctgccggctacaatgccgtttgccaatttttgggagccaactggtatgctttggcaggaactgtcattctcgctgccggagccgttcttcacattgtctacgcattttggttgaccttgcaaaaccggaaggcgcgcggtaacgaccgttatttggtgaacactcgcccgcaaaccgtagaatgggcatctcaaaacatgctcgttttgggtatcatcgttttgttgggattggttttgcacctcttcaacttttggtacaaaatgcagctcaacgaaatcgtcggtcatttgcccgaagtaaatcctcacgacggaatcgccttgatccgcgaaacattcggttgcccgatctatgtagttatttatctcatttggttcgttgctttgtggttccatctcactcatggattttggagtgccatgcaaaccatcggtatcaacaaccacgtatggttcaaccgttggaaatgtatctccaacattttcgcaacaatcatctgcttgggctttgccgccgttgccatctctttctatgtgatgagcctgaccggttgcggaacttgcaccctttaataaaccaaactatttattcacagaaaaacaattgttatgtctaccatagattctaaaatacccgaaggcccattggccgaaaagtggaccaattataaagctcaccaaaaattggtgaacccggccaacaaacgccgtcttgacattatcgtcgtaggtacggggcttgccggtggctctgctgccgccactctcggcgagttgggtttcaatgtattgaacttctgcattcaagattcacctcgtcgcgcccactctatcgccgctcagggaggtatcaatgccgccaaaaactatcaaaacgacggagactcggtatatcgtttattctacgacaccatcaaaggtggcgactatcgtgcccgcgaagccaacgtttaccgtctggccgaagtatcgaacaacatcatagaccaatgcgtggcacaaggcgttccctttgcccgcgaatatgggggtcaattggctaaccgttctttcggtggcgctcaggtatctcgtacattctatgccaaaggccagaccggacaacagctgttgttaggtgcatatgcatcgctcaaccgtcaggtgaaaaaaggtacggtaaaacaatttacacgttacgagatgctcgacctcgtgattatcgacggtcgtgcgcgcggtatcatcgcccgtaatctggttaccggagagattgaaagattcgcggcacacgctgtcgttatcgctaccggcggatacggaaacgtttatttcctttcgaccaacgctatggcatcgaatggctcggtagccgttcaatgttatcataaaggcgcttatttcgccaacccggcttacgctcagattcaccccacttgtattcccgcacacggcgagttccaatcgaaactgactttgatgtcggagtcgttgcgtaacgacggtcgtatctgggttccgaagaaaaaagaagatgccgaagctatccgtgccggcaaattgaaaccgaccgatattaaagaagaagatcgcgactactacttggaacgtcgttatccggccttcggtaaccttgttccccgcgacgtggcctctcgcgcagccaaagaacgttgcgatgccggttatggtgtaggagctacgggttatgccgtttacctcgatttcaaggaaagtatcgaacgcttgggtaaacaagctatacaaggtctcgaccaccacgtgatcgaaagtttgggcggagaacaagccgctatccaaataaaaggaaaagaagccgtagccagccgttatggaaacctcttccagatgtatgaaaaaatcgtcgatgataatccctatgagactcctatgatgatttatcccgcatcgcactacacgatgggcggtatctgggtggactacgaattgatgacttccattcccggtctgttcgctatcggcgaagccaatttctcggaccacggagccaaccgtttgggtgcttcggctttgatgcaaggtcttgccgacggttatttcgtacttccctatacgattcaaaactatttgtccgaccaaatccaagttccccgtttctcgaccgatctgcccgaatttgtagaagccgaaaaagcggtaaaagctcgtatcgcccgtttgatgaatatcaaggggaaacgttcggtagactccatacacaaagagttgggacgtatcatggtagactatgtgggcatgggacgtaacaaagccggattggaaactgccctcgaaaaaatcgaagaggtgaagaaagaattctacaccaacgtgcgcattcccggcgaagccaatacactgaacgtagagctcgaaaaggctttgcgtgtggaagacttcctcgaaataggcaaattgatggccctcgatgctctcaaccgcgaagaatcttgcggcggacacttccgtgaagaatatcaaacagaagaaggagaagcaaaacgtgacgatgaacactttatgtatgtaagctgctggaaatatcaaggcgaagacaaaaagcccgaattattgaaagaagaactgaaatacgaagctatcaaagttcaacaacgtaactacaagaaataatttgtttaatcgccgttttaattccggtataacacgataaagttatggaaaaaacaataaatataacactcaaagtttggcgccagaaaggtcccaaagaaaaaggtagatttgaggaatataaacttaatggtgtatctaccgacagctctttcctcgaaatgctcgacttgctcaacgagcaactgattaacgaaggcaaagagcctgtagtattcgatcacgattgccgcgaaggtatttgcggtatgtgttcgctctatatcaacggacacccccacgggcccgacaccagcgttaccacttgccaattgcacatgcgtaaattcaacgacggagacgtaatcaccgtagaaccgtggcgttcggccggattccccgttattcgcgacttgatggtagaccgtcgtgcattcgacaaaatacagcaagccggaggatatatctcggtaaacacgggcggtgcacaagatgccaacgcaattcctatctctaaaatcgatgccgacgaggctatggactcggctacttgtatcggttgcggagcttgcgtagcagcttgtaaaaacggttcggccatgttgttcgtttcggctaaggtaagccaattcgccctgctgccgcaaggccgcgtagaggctgccgaacgcgctcgtgctatggttgccaagatggacgaattgggattcggtaactgtaccaacaccggtgcttgtgccgccgaatgtcccaaaaacatttcgttgacgaacatcgcccgtttgaaccgcgagttcatttgcgctaaactgaaagactaaaaaatcctaagttcatatcttgaaaactatcccggaaatccgggatagtttttttatgcccctacccggaagctgcggcatgtcgtcatcgagatgactgaaagattgtatttcccaaatagcgaattatttctatctttgtcattacgaagataggatgcggttcggtacaaccaaatcggaaatgaaacttccgtttgtatctacactcacctttcgctatctttgtcactacgaagataagatacggttcggcgtagccaaaccggaaacaggttttccgtttgtctctgctctcaccttttcgtatctttgggagctattctattttctatcggtcatgaaacggggttttatatacactatattattattatcgatattactcggctcatgtaaccatcatgacaccgaaaaagctgaaatcctctatcaaaacggtgtggagatggaaaagcgttatatgcccgattcagccgtcattttctatcataaagcattaaaacgactcgacgaatcgaacgacaacgagttaaagagtaaaatatacaatcaactcggggaccttcttctggaacacaacatttacgaaaccgctcgaagcgcctaccaacaagctctatatgtttcgaaagaattggaggacaagagcaatctttcccacgcctatcggggcatagggaaataccattttctctataaagaccgtgacagcgccctttactatttcgaaaaaccgctcgaatttttcccggaaataaaaaatcgggaagaacgttcctcggtctataataatctgacaagcgcctataaattgaaaaacgatataaaatcggcattggaatgtaatgcgaaagcgttgtcgttgaccaacgacgaagtaaaacgattgcgcaactatgccgtacggggacagttattcgccatgcaaatgcaatacgattcggctttgttttatctcgaacaagccagccgcagcgaagaaaaatcggtaaaggcctcggcctatttcaagctggccgatctacccgaaaagtcgggtataacagactccatgaaatatcgttatttacaggaggcttatcgcctgtccgattcgattgaaaacatggccgtttctcaccagatagatcgacaagaacaaatacggataacttccgacctgaaagagcaaagtcatatacggctcattgtatcgataaccgttagcataatcgtcgttctgctgttatcgatcgtggtattcttcatttatcggaaacatctgaaacgccgcaacgaacgaatcttcgcccacaaatgggaaagacaagaagcccgtgcccaagaaaacgaaaaccgggaattacaaattatagatattatcagaaaagcaggagaaacatgtagcaaacatttcaaagaaagcaatatctataccgatttatacaaaaagataaactccgataaagaatcgttgagttataacgagcagaaatcgttccagacgactatattgaaagagttcgatacctatttgcaacaagtttcgagcatagtaccgctaaccgacaacgacgcttttctatgtgcattgttgcaactcggtttttcgacgaaagagtgtgcggcttgtcggggtatcagcagcgaaaccatacgttcccaacggacacgcatccgaaaaaaaattcctcaaaactttctctctcagggattgggtatcgtcattttaggagaagaaaatctttcaaaacgttaaattgcaacgtttcaataaataactcgctgataatcaaagtgtatttatttttaaatagcaacgctttctatgctgctatgtacatatatttttttcatttttgtaatattaatcttcaatctgaaagaaatatacaacacaaaacataaaaacaaaacaaagcgtatgaaaaaaattacaagttttctaatttctctatgtatcgtactcgggttctcggaagtacaaagcgaaataaaacttactacatcgctggaactcggtagtgattttactttttaccccaagccggtagcatccgacggtaaagtaatcgtcgactggggagacggaaccaaaaaagaatataccgtagatggaatgtggaacaaaagcgtgaacggaacccaagtgggcgacacaatccgaatattttctcccatacagacattcgattgttccgatgcccatgtaacttcggtcactattatcgatgaacctgatttgactttactggattgctataaaaacgaaatagagcgtaccaacctcgatatttcaggggctttgaatttggaaactctaaactgttacaacaatcccaagctgctattcctcaatctatcggctcataaaaaattaacaacactcgactgccgacacgacaaaagcaacacatcggatccagacgataaaggaggtattacaaccatcatcttgcccagcgaaggaagtgaattggaaaatataactgcctataataatgacataagcagtatcgatttttcgggttgtcccaatttgcgttacatcaacttggaaggaaatgctctgatggacataaatgtatcgagtttaacgaacttgcgcagactcgatattcgtaaaaatcatatctcgaacttggacgtatcgaaaaatactgctttggaaaaactctactgcgacgataacgccctgaccgaattgaatgtatttgccaataccgaattgatggacttggtatgttccaacaaccaaataagcaatctggatttaacggcaaacatcaatatcactaacctgtcttgcgatggcaacctattgaaaaaaattacggtctccaacatgccacgtctgaaatcgttgaaatgcggtgataaccagttggaagagatagaccttagcaaaaacctccaccttcaaaaattctgggggcaaaacaatttattctcattccttgatttctattataatcaggggttaaatacgatcgatattcgcaataacccaagaatgaccccttgcagtctcaattttatgtaccagactctttccggtctcgaaagtgcaagtccgtatgtgaatttattcctagaaggaagcaatgccgaaacttcttctacaagtattgctaccgaatcaaaatggacagtagacgtaacaggcgacggcagtgccgtatgtaaagatgtaacggcaacgatcgaaacttcggaattcggaaccatttcattatctcaaccagatcttgtttcccacgaattgcatccgatagaaaacaatactttggaagccggcgtaccggtatacataaccgcgactcccattgaaaattatcaggtgcgttactacgaaataaacggagaacgcataaacggttccatatttgcaactaccgaaaatgtcaccgtatcggctgtattcgttcctaccgcctctaacaattacatagaaatgggagtagaaagcaatgcttcgctttcattcggcataagcggcatagacccggaaacggaaatagaaatagattggggtaacggagaatggcaaactatgactatcgacaacgaatctattacccgtatcgacggtaattcaaaaggtacgaccgttcgtatcaacggactgatcgactatttcgattgttcggaaaatgatttgaaatctctcgatgtatctcataacgccattctcgctacactcgattgttattggaccggtatcaccgctctcgatctatcgaagaatactgcattgggcaaactcaactgttcctacaacagtatcggaactctcgatttgtccaacaacaaagcattgttctcgctctcttgctataactgcgaactcggttccctcgatttgtctaacaataccgaattggaagaggctgttgttaaaaacaacgaactgacatcgctgactgtttcctcgaatacaaaactactattactagacgtgcagaacaacgagcaactaaaatctatcgatgccagtatgttaaccgatctggaagaacttcaatgttcctacaccggtcttacagccctcgatgtcacccataatacgaagttggtaaaactcatctgttcgaacaataaacttaccactctcgatctatcgaaaaatacattgctcgaacgcctgttctgcgacggaaatcaattgacttctctcgacctgagtaataacacgaaactcaactatctcgaatgttccggtaacggaatgtccgcctgcgctttgaacgacttgtattacaatctacccaaatgttcaacgacacccaccaatgtaaatatgttcatcgcaggaatcaacaaccccaacgaagcggaaggtagcgaaacctctatggctactaaaaaaggttggaaagtttctgtcgatggagatggcagcggttgtaacgaagcttacataactatcgagcctaccgaaaacggaactttggaattgcggaacagcgacaacgaaatcgttaattcgggtagtaaagtaataaaaaatacgacagttaccgtaaaaggtaatcccgacgaaggtttctatctgaaaaatgtttgggtaaatggcgtaagcgtcaccaacggagaatttgtagtcaaaatggcctcggtcgtaacggctgctttcgacgaaggttcaagcataaccgagatagaaaattcgggaataaagatatggagcacttcgggaattataagagtaaatgccgaaaatgctcatgtccaagtctattcgacgagcggtgcattagtttgggaaggtaatatttatcaagaaaaaaccatcgatgcaacccgaggaatttatatagtgaaagttcgtaacgcacaatccacacaaagtaaaaaaatagttgtggaataagccgatcttcattttagaaaaaaatcccgttgtaaagaatctacaacgggatttttcatattacatggcacaaccctatttccatcaagccgacacggaaacttcgaagcccaacgctctcgctctgtcggctatctgttccaactcctcacgagacactttttcgagcgattcctccggcgttttccgatcgatggtataaaccattaccgaacgaggagaaatgcgctgtaaagcctccaaccacggtttcagctcctcctcgaccgtattgtcaatacgcttgccgtcgtgccaccctcgcaaaaacattgtttggataatgacattacccgaaaaacgttttaaattatccactaccttattcacatcgaaatgcggatcgttcggattatctatcaacacgactgtttcgggacgaagcgaatcgagtttaagtatattattatctaccctgttcaatgccctgaacaccgattcgtcgtgaatacgggtagcgttggatagtacgcttatcttggcttcgggataatagtgatcccgaagataaagcgtggtatctatgattttctcgaattcagggtgtagagtaggttctccgttcccggcaaaagttatcacatcgagcttttcccctgcctcgtgcatggattgtaaacgagattttaactcctcctctaccctatcggacgaaggcaatccactcttccccactccttgtgcattataaccgcattcgcaatacacgcaatcgaatgaacacaacttaccgtccaccgggagcaggttgacacccagcgatattcccaaccgtcgactgtgtatgggaccgaatatgatttcgtgaaacaatactgtctgcatagttttacctttttacagttacaaatataatgaaagccgggagtagaggcaaacgtaaatctcatttctgaatctactatgtctaattatattccttattccataaaaacaaagtttacaaattattgctccatattcaatggaaatcttactcaattctttatatcattatctattataaacattgtgtttataactataattaatttatttccagaataataactattctatccacattcatataaacagattatcaactcaaaaacgatataagaacgaacagttagctatttatagactataaacaagttatcaacgagatttcaactgataaggtcttatagttataaacaaattataatatattattaatcaaatagttataatattatacacttataaataaacagtatatcgacaatttatccacaatagatataaacacatgtgaataatataattattgcaaaaacgtagcgcttatgaatatcgaaagatttacatttgtaccctatgaagagaaccatattcatattgtttctttttcttttcctgtttattccccgtacaaaatcccaaattgtacaggaatcacacccggcatataaacatttttatcatgctgttatagacaacgataccgtattggtaatagaattacgtacgtttcatgtatttcctcccgaaaaattcaaagacaaaaaacaggaaaaattttactggaagaccgtgcgtgatgtgaaaaagaccctaccctatgccaaactcatctactccatactcattgaaacctacgaatatatggagactcttcccgacgacaaagctcgagaagaacacatgaaaaaaatggaaaaagaagtttttcaacaatataaaccgatattgaaaaaatttaccttgtcgcagggtaaaatgctcatcaaacttatcaaccgggaatgtaaccaatcttcatacgaactaatcaaagcattcttgggcagtttcagagccaacttctggcaattctttggaaaaatattcggagcttcccttaaaaccgattgggatccggaaggcgaagataaaataatagaaagaatctgtatattagtggaacaaggttctttatagtatatcgattctaaaacatattttttatttataaagcacttaattttaataagttatttttttacaaagctatattcctaactgtttaaagaaatcccaaattactaatcccgccgttaccgacacattcagtgaatgtttagtaccgaattgaggtatttctatacttcccgtacacttatcgaccaccgactgttgtacacctttcacttcattacccaacacgacggcatattttttattcttatccaattttatgtttgtcagacttatactgccttctacttgttctacggcatatacttcgtatccggctgccaacaagttatcaacagcctcgcaagtgtcttgaaaataaacccagtcgacactgtcctcggctcccaaagctgtcttatgaatatcggtatgaggcggtgtagccgttattccgcacaaataaatacactccactctgaaagcatcggccgtgcgaaatacagaacctatattattgagactcctcacattatccaaaataacggtcagtgatattttttcaacccgtttgaactcctcctgtgaaattcttttcaaatccaatacactctttttcttcataaacgatcatttttataagagcctaatttccattttgtacaaagatagtataagccgagcgcaaaaacaaccatatagagccatgtcgaagtacagacgattctcacgttttcgataaatataaaatacacccgtcttatatccaacaatctcctatctgcctgctccacggacgcaacactatgtgcataagttgttattaaatgtgtataaaccgttataaaatacttgcacaaaaaagtaataaaaatattgcttttaaaaatcatatatctatacagcactgcatgtcaataaagcaaataataactcatcgagtttttagttcatatatccacctaaaatatctatttatcaatcatgcaaatagaataaagttattaactttgcatattgtaaacagatagttgataaagaagataaagagctcatatagaaaagataaaaacgttgataaagtaagaatatattttcatagtcagttgaaactttaaataacaagtattttaacaagaagttatcattactatcaacagtctattatcatcaacaataaagattttaaaattaaaaaataaaaagaatatattatatgttcgatgtagatatctccaaaggttatgtggatatgcctattcccgaagggatagacttagtgtccgagatagagagaatgaagcgggagaaaaatgctgtcgttctcgctcattactaccaatcgggagatttacaggatatagccgattatgtgggagattctttggcattggctcaatgggctgcgaaaacagatgcttccatattggtgctttgtggtgttcattttatgggcgagaccgccaaaattatttgtcccgacaagaaagtactgatacccgacatgaatgccgggtgttctttggcagacagttgtccagccgatgcttttgccgaattcgtaaaagttcaccccggctataaagtcatatcttatgtaaatacatctgcggcggtaaaggcttataccgatgtggtagtcacttcgtcgaatgcccgtcaaatcgtagagagtttccctgccgacgagaagatcatattcggacccgataaaaatttgggtaattatataaacagtatcacaggacgtgatatgttattatgggacggagcttgccacgtgcattcccaattttcattggaaaaaatagtagatttgaaaaaacagtatcccgatgcgttgatactggctcacccggaatgtaaaagagatatattgttagtagccgacaaggtaggttccacggctgctcttttgcgctttgcgacacaatcggactgcaagcgtttcatagtagctaccgagtcgggtatattgcatgaaatgaagaaaaacaatcccgacaaagagtttatacctgcgcctcccaacgatagtacatgtgcttgtaacgagtgtaatttcatgcgattgaatacgatgaaaaaattgtataacacgcttaaatacgagttgcccgaggtgatagtggataaagagatagccgaaaaagctatcgaacctatacagcgtatgctcgacatatcggcttcattgggaatttaaaaaagagaataataatttcattcataattgtttatcatggaatataatttcaaagagatagaaaaaaagtggcaaaagtattggaaagatcatcatatttatcaagtaaaagaagatgagagtaaacccaaatattacgtactggatatgtttccctatccttcgggagcaggtctgcatgtaggtcacccgttgggatatatagcttccgatatttattccagatataaaagattgaaggggtttaacgttcttcaccctatggggtatgatgcatacggtcttcctgccgagcagtatgccatacagacgggacaacacccggccataacgaccgaaaagaacataaatcgttatcgcgagcaattggacaagataggcttttgttatgattggagccgcgaaatacgtacttgcgatcccgaatattataaatggactcagtgggcgttcatacaaatgttcaatagttattattgcaacgacaaacaacaagctcgtcccatagaagagcttgtaaagactttcgaaacgacaggtacggaaggtgtgaatgcagcttgtagcgaagaactttcttttacgtccgaagaatggaatggtaaatcggagaaagaacaacaggaaatattgatgaattaccgcattgcctatttgggcgatacgatggtaaactggtgtccgcaattgggaaccgtgcttgccaacgacgaggtgagcgagggcgtttccatacgagggggatatccggtggaacagaaagtgatgcgtcagtggtgtctacgggtatcggcatacgctcagcgtttgttggaaggtctggataaaatagattggacagattctcttaaagagacccaaaagaactggataggtcgttccgagggagccgaaatgcagtttaaggtggtggattccgatgtggagtttaccatatttacgacgcgtgccgatacggttttcggggttacttttatggtattggctcccgaaagcgattatgtaaaacaagtagtcacccccgatcaacaggaagctgtaaacaaatatttggacagcataaaacatcgtaccgagcgtgagcgacttatggacaagagcgttaccggtgtgtttactggtgcatacgctgtcaatccgttgaacaataaacatatacctatctatataagcgattatgtcttggccggatacgggacaggagctatcatggccgtacctgcacacgatagtcgggactacgctttcgccaaacatttcgacttgcccatcataccgctgatagaagggtgcgatgtttcggaggaaagtttcgatgccaaagaaggtaaaatgataaattcttgtggtaatggattggatttgaacggtatggaggtgaaggaagccattgccgccacgaaaaagtttattaaggaaaagggtataggcagggtaaaagtaaactatcgtttgcgcgatgctatattcagtcgtcagcgttattggggtgaaccctttcctgtttactataaagagggtatgccttatatgcttgacgaaagtaaactacctttggaacttcccgaagtggataaattcctaccgaccgaaacaggtgagcctccattaggtcgtgctaagaactgggaaacagaagagcattatccgttggagttgtgtaccatgccgggattcgcaggttcttcggcttattatttgcgatatatggacccgcacaacgataaagctctggtatcgaagaaaaacgatgagtattggcgtaatgtagacctctatatagggggaaccgaacatgctaccggtcatcttatttatagtcgtttctggaataagttccttttcgataaaggagtggtttgtgaagacgaacctttcaagaaactgataaatcaaggtatgatacaggggcgttccaactttgtatatcgtattaaagatacgaatactttcgtatctttgaataaaaagaaagattacgatactactcccattcatgtcgatgtgaatatcgtaagtaacgatgtactcgatatagaagcatttaaaaactggcgccctgagtttagttcggccgagtttattttggaagatgacggcagatatgtatgcggttgggcggtagagaaaatgtccaaatcgatgttcaatgtggtaaatcccgacgatatcgtagaaaaatacggagccgatactttacggttgtacgaaatgttcctcggtcccatcgaacaaagcaaaccgtgggatacgaacggaatagacggcgtacatcgttttctgaaaaagttgtggaatctgttttatcaaggtgataattggattgtaacagatcaagagcctacgaaagaggaattgaagtctttgcataaactgataaagaaaatatcgtgggacgtagagaatttctcgtataatacttctataagcgcttttatgatatgcgtgaatgagttgacttctcttaaatcgcacaacaaacagatacttgaaaaggtaattatattgttggctcctttcgctcctcatattagtgaagagttgtggcatgaattgggttacgattctactgtatgcgatgcccggtggcccgaatggaaagaggaatatctgaaagaagatgtagtgacttatgctatttcttttaatggaaaagcacgttacaatttggaaattccggcagatactccccgtgaagaaatagagaaaatggtacttaatcatgaatcttcggtgcggtggctcgaaggaaaaacacctaagaagataatcgtagtacctaataaaatagtcaatatagttatttgataaactttatccatgttcgtaaattcatagcgaacatggattttatattttacatattatgcgtttgccttttaatagtgtctggtattcgataaaagactatttgattatcatattcgggttactgttgtatgctttgggttgggtaggttttctgataccgaacgaaataacgacaggaggtgtaacgggtatatcggccttgatatactacggtacgggtatacctatatcggtatcctattttgttatcaatgtattattgttgttggctgccatcaaggtgttgggtcttcaattctgcatacgaactattttcagcgtaatcgtatgttcttcattcttgtctattcttcctttgttcataaaagatgctttggtagacgaacaaccttttatgtcggctataataggcggtattctgtgcggttcgggtattggattggtattcgtgtctaatggaagtacgggaggaaccgatattatagcggctatcgtaaacaaatacaagaatatttcgtttgccaaaatgatgatgtacatcgattttttaattattgcctgctcttacgttctgttccatagtgtggaaaaaatgattttcggatatgtagtgatgggggtaatgagttatacgatggacatgcttatcaatggcaaacgtcagtcggtacaaattttggttctgtcggataaatacgaagagatagctactcatgtcaataacgatatacgtcgcggcgtgacagttatcgatggcatgggctggtattccaaacaacccaaaaaagtattgatgatattggctaaaagaaatgagtcggttaaaatatttcgcttgataaagtccatagacccgaaagcttttatttcccaatccaatgttgtgggagtttatggagaaggtttcgacaaaataaaagcataaatctacccttcgggacttctttttttccctattataaaggggaaatgtttgttgatgatataggcgataggtaggcacgaaaaaagactcaccaaagcgaaaactatattaggaactattttgccgtataaggtttctaccggtatgtgaaagacaaataccatgattccttttaagaaagagaacgtaagcaaatgaaaactgttgataatgagtgtgtttttggatatatagattatgatattttgaaaaacaggttttaaggataggaaattgctcgacagatttatcatacatataccggcgaaacttcctatgaaaaacagtatatagttattataattatttgtggccattattatatatccgttttcatgagctatgaaaataacaattcccattgtcaggaaaacgagtattatatggagtaattttatttttattatttgtatgttgtgtacgattaaattgcctattccgtagaaaaccattcctactatggcagttcccaagcaaaagggtaatgtataggggttgtaggcataatttgtgtatcctatgacggcgataacgatcaataccgaaatctttatcgatttgcttttcttttgtaacggtttgaataggaggtagtaaaatatttccaagaaatagagacaaatgaaaaaccacatgggtgtattgtgtatcatctgtttactatatcctaaaagaatgcctattatgggggaataccaagtagtggatattgtcgcatcttcgccgaaattacgacctgcaaataaccagaacagataggtgatgaggtttatccaaagatagggaaccatgagccctttgaatcgttttatagcaaactctttaaagttggggtgtttctcgaatgaaaaaagacaaccggacaaaaagaagaaaagaggcatgtgaaaagtatagataaagtcggtgacaggttgggaagcatgagcatgccccaacagaaccaaatagatacatatcgatttggcatagtctatccacaatatcctttttcccgtattcatgtttgcggattcataagtcttttataatctgtatcggcgagtatttgcaacaaatagggtatgcagaaaatgtaataagatatatctgctttcgattggaatagagcttgtgtaaaactgtattggcaaaccgcttctataaaatggattgtcacgataccgaataacagcagaacgctgaaaaatctaacgtcgttgtagtttctgcaaaagaaacttcctgcgatcgctatcagtacgaagagcactatgaagtgaaaagataccaaagatgattgtgtggagaacggattgacctcccaaaactcatcgggatatagccagatgaaaggaacgaaagtaatcgcgaaggacaataggaaaacaaagccccacaggaatattttcttcggagatgttttttcttgaaagagttgatacaatccccatacgatgagcggcagcacgaacacgttgcgaatagagaacagcaaccctcctatgacagcgctccatatcagttgtcgggtggaaaatgtgcggaatcgttcgagataaaggagaaagagggtgaacagtacggcgttgatgagtatggtacttcttgaaaaaatttcccagtagatacataaagaagaaatcgaaagtataaaaaataaactataactttgaacagatttacgtttgaaatggaatgccagcaaagcaatggaaataacggttatgaatcctatttctcgtatacaataaaatggatagcagagaagaaaatagaacggcattgcccccggatagttgccgatagaagttttttcggcataagggtacagaccgtttgaaacggagtcccaaaaaagatcgataataatccatctgtcggccgtgaatatttctttgggaataaagaaaagaagtgatgaagtagctattataaaagtgattataccgacgttgacaagtttgcgaccgaaagtcggtttgtatttgaataagaaaatgatgaaaagtatatataacacgctcgtaatagctccgcatgcgatagatatcttcgataagtatttaaaataaaacaagatatttatcgttataaacatgagtagagaaaggtaattttgaaattttgaataagatttcattttgtttgttcggattttttacaaaaataattatttaatattatgaaactggtttttgccacgaataatagacataaattggaagagatatcggcgattatcggtgacaagatagagatactcggtttgaatgatatcggttgtcatgacgatatacccgaaacggccgatactttcgaaggtaatgctttgttgaaagcccggtatgttaaggataaatacggatacgattgctttgccgacgacacgggactgcaagtggaggcgttgaacggggagccgggtgtatattcggcccgttatgcgggtgaaccttccgattctgagaagaatatagataaattattggctaatcttcgagatgcagaaaacagaaaagcgagttttgttacatgtatagctttggtaacaggtagcgaggagcatgttttttacggagaaatatccggaaagataatccgtgaacgccgaggttcgtcgggattcggttatgattcggtttttgtgccggaaggatatgaagaaacatttgccgagatgggagaagaggaaaaaaacaagataagccatagggcacgagcggtaaaaaagttatcggatttttttaatacactataatcgtttgatatgttgaaaagaatatcgggtttaataggtttcgttatattgtcgtttacggttgcgacctatgctcaattggccgtgggcgattggcagatttatacttcgacgggaactcctgtaaaggtcatagatacgcctgaaagggtttactatgtgtcgggtaggagtctttttggtttcgataaggagacggaagagatggaatcttacagtaagaacaatatattgaacgatatagatatagctaatatttattataattacgataaaaagtatctggttatcgtatatgccaactccaacgtagatattttgcacgataatggaaaagtgtttaatataccggatattaagaatgccatattgactacggcaaaaggtatcaacgatgtaaagttttacggtgatagaatttatttggctaccgactttggtatcgttgttttgaacgataagaaaaatgaagtgagcgaatcttataattacggaaaaaaaatcagtttgataggggcttgtgacaagtattggttttttgttgccgacgacggtctttattatataaatagcgatgccatcaagtacgatatcgccaagtgggttttattggacgatgtaccgggaacgactatctatgcgcttatgcctttcaacgataaatatttgttttattctaagggcggcaatcttcatttcctcgatataaataacgggttgtctctattgggaaccttgaatatgggagtgatgaatgtagataaatattatgacgggtttgttttgagaggatatgtttatgtcgctttctgtaaaccggatatagtgaatggagctatacagttcgatggtattttcaattttcaaaatcaatcggattatttggtgaatgtgttgacttcttcatacgaaaaagatatgtctatatgggctttgggagaaagcggtttgtgtcatttcagtatggggaataatcaattcgttatgttgaaggaaccgtttttgcccaatgtatcgaatgtggcagacccgtggaatctcgttattaacgatcataaactttatgtaagtaattcgggtccccgtagaggaaccgaagatcagtacgtgcaaacaaaaataagcgtattggatcagggaaactggtctgtaatcgatgtgggagaagtgccgttggaaaatggtaaaacaggaaatagaatatattcgagttataatatggcattcgatcccgatgattccaacactttttatataggaacttggttcgaaggcatatataagatttcggggacagaatgtgtaggacattatacgtcgttgaattcgccgctttctaagggttgggctatggctgtgcctaatattgtttttgatagagatggaaatctttggatagcacatgcgggcgatgtgggcgtaagtatgttgcctaaggccaagcaatctatcgatacagatgaattgaaagcgagcgattggtatcaattcggttattcggaaataaagaataataaatatgccaaactgcttataccgaatcattctacggcaaaatgggtcgtttatggggattggcccggttctatattcgcttttgacgataagggtacgtataatacgatagccgatgacagaacgaaaaatatagtttcgtttatggatcaggataataaaacgtttactccgaattattacacctgcatagaagaggataacaacggtcagatatggataggaacttcgtccgggcctatcgtgattacgaatccagaccatgtttttagcgacagtttccgttgtactcgaataaaaatagcccgtaacgacgggacggataatgccgattatttattacagaatatcaatattaccgacatattcgtagatggcgccaatcgtaagtggataggaacccgagaatcgggattgtatttggtaagtgccgacgggtcggagattttgaaccactttacggcagagaacagtaaactgccttcgaatcatgtaaccgaagtaatcgtcgatccggtaacgggtgtggcttatataggaacgaccagcggcttggctgcttatcggtccgatgctgtacaatcgtccgacgattatagtaatgtctacgcttttcccaatccggtgagacccgattatgaaggttggatatcggtgacaggattgatggagaatagtttggtgaagattaccgatacggcgggtaacttgttttttcaaggctattccaatggcggacaaatatcgtgggacggcagggatcgtagcggtaatcgggtgaaaaccggcgtgtatcttgttttcgcgtcttccggtggttcgtcgaaacaatcgggagtagttactaaaattttagttgtcaattaattaaagtatatgcatcctcttcgattattcgaatattgccctcgttgcggttctcatcgtttccaagagaacgatgcttcttccaaacgttgcgaggattgtggctttgtgtattatcttaatccaaaagcatcggtagcggcattcgttatggataggcaatcgagaattttagtttgtcgcagggcgttcgatccgtccaaaggcatgctggatttaccgggtgggtttacagaatgtggagaaacggtagaggaggctgtcgttcgggaattgtcggaagagataggttggaaaccgaagcagatgaagtatttgtgttctttcccgaatgtctatcgttattcgggttttgacgtacacacgatggatttgttttttctctgccgaagcgatgaagatatgagcgatttgaaagcgcatgacgatgttgccgaatgtttctggttgcggagggaagaaatcgaacccgagaaatttgcttttcaatctattcgtaaggctgtcgatagattattgaaagacgataaatactgggttaaggattaaaaaagattgggaaaccactctttcaggtagttgataccgattaccaccaagtagtaccgggagaattttcctaccatcatggagagtaacgtgccgagaggattggctctgagtagtccgagagccacgatcatgatgtcgccgataaccggaataaagacgaagaatccgaaaagagagcctttccctttcagaaagcgttgcattttcgagagtttttcttccggtattttcagataggtgtgtatccactctgtttttcccaagtagcctatatagtaacaagtgacgcctcccaaccagtttcccaaagtggcagagaatacacagccccaagaatcgtatccggctattaaaagaagtcccagcacggcttcggaactgaaaggaattatgcttccggccagaaacgccgctataaaaagaccgaagtatccccactcgctcagaccggcaataaattccatacgaacaatcctgtgtaaagggttaatatgagataaaacaacactactccgtattttttcgtattgttcgtgaagaaaaatgcagcttgcatggcaactgccatatttaggacgggcagatagagggtatagtttctataatctataatcagaagcatggcggaatagaccgacaataggtttataaagccgttataagctcttgtttggcgtttttcgttgaatgtggtatatagtgtcgctgtaccggagaaaaggcctaaaagcgcggttaaaacgattgtccagaattgcgggtcgttaaagggaagtgtttcgggtatatgaaacgtaaaatcgggaatcaatgcagacaatcctgagaaaggcatgattcctattccgatcaatacccagaacggggtggcgaatccgatgaatgctcctaacagggatttcagcgtgaaataccttatttgcgcgaatccgatgataaacaggggtatgtaataagcaaattcgggacaaaacagggtacatagggagatgattcccatcattagaaatgccggttgtgccctttcttgctgataagccgagaaaaaagaaaacaaaatcgtcgttagaaccacagccattatgtttccgttgcataagagcgaaagggacggggaacagacttccaacaacagaaaaaataggaatggaagcaatgtgtgtttctgaataagagagaaaaggttgttgatacgcaacagcagaatacccccggatagaataagaatgctgttgaccgaatggtttgataggggggaggaaagccatctttcggcactcggaaacaagattccgggactcccttcgcaagggagatatgttgcgaaccgactcgtgagatatacaccggtcagatagaaaacaatcgatccaaccagtgtatatttattgtttatgaatgatttcagattcattgttttacaagtcggctcctatgtcggaacgaaaatatttaccttcgaaagagacggctttggcgcttttgaaagagtttgccaaagcctcttctttggtcgcaccgtatgagctgagggcgatgacgcgtccgccggaggttacgatttttccgtttttgaatgtcgttccggcatggaacggaatgctgtccgtcactaaatccagtcctgtgatttccttgcctttttcataggaaccgggatagccacccgataccagcataacggttacggcagcccgtgggtcttctgtcaactctttttcccggagcgttccttgtgccacaccttcgagcaggtcgaccaagtcggattgaatacgcaacatgacgacttcggtttcggggtctcccatacgaacgttgtattcgatcaccatcggttctccttgtacgttgatcaatcccaagaatatgaaacccttgtacgtgatattttcttttttcaaaccttcgatggtgggttttacgatgcgctcttccacttttttcatgaacgtggcatcggcgaacggtacgggtgaaacggctcccatgccgccggtattgagtccggtatcgccttctcctattcgtttgtaatctttggcaacggggagtatgcggtaatctttgccgtcggtgagaacaaagacagaacattcgatgcccgatagaaattcctcgataaccacggttttactggcattcccgaacatgccgttcaacatttgtttcaattcgtcttttgcctcttgcaggtcgtttatgataagtacgcccttgcccgccgccaatccgtcggctttaagcacgtaaggggctttcaacgtttcgagaaaggtatatcccgcttccagattttcctgagtgaaactttcataccgggccgtgggtatattgtgacgcatcatgaatcctttggcaaactccttgctgccttccaagcgggcgccttccttcgacgggcctataacaggtatgtttttcaactcctcgcaagatacgaagtagtcgtatattccttttaccaatgggtcttcggggcccacaacgaccatatcgatatgtttttccactgcaaattttccgatggcatcgaagtcggtcgccggtatcgccacgttcgtacctatggctgcggttccggcatttcccggtgcgatataaagtttgtcggtttttggactttgctttatcttccaagctaaggcgcattcgcgacctcccgatcctaataatagaatattcattgtatggagtttttaggtttattctggtttgtcggagtcttttttaggattgtcgttcgatggttttatggagggctgcttgaaggttacgaatttccgaaaagccgcttctccgtgcaagcgttccgatttttcgccgtcgggtttgaaccgttccggacgatcgaatgtttttttccctatgggttttccctgtttggaatcccggcggaacgaaggtttccccgatcggtcgaaacgttctgttttgtcgcttcgtcggtcgctgtcgtatgtcctttttctatcgaaaggagctttgcctcgcagattggttcgacgagtttgtccctcccgtttatccaagtttttgccttcttctttgaattctttgtatcggccgtcgaaaatctcgtatttccggtattcgcactccaaagctccgttcatcagatctatttttaccgagggtttcagccctattttatcgaagcattctttatggtaactgatgatccatgcatcgtaccctttgaaaacatgctttaaacggttgcctatcgattcgtacagtccgaacaaatcgctcgatgagatacgttctccgtaagggggattggtgatgagaatgccttgttcggacggagcggtctcgtatcgttgtataggcatgattttgagatcgatgtatttggctactccggcgctttttatgttttttgtcgcgatgtcgatcgctcgcggggaaatgtcggagccatatatgcgatgggtaaactcttgttcgtgactatcgtcgttgtagagcgtttcgaacagttcttcgtcgaaatctttccatctttcgaaagcgaaacttttcctgaaaataccgggatatgtatgggtggcgatcaaagcggcttcgatgagaatggttcccgacccgcacataggatctataaagtcggtttctccgtgccaccccgttttcaatatcattccggcggccaatacttcgttgatgggggcttcggtttgtcccacgcggtatcctcgcttgtgcagagactctcccgaactgtcgagcgacagcgtgcagctcatgtgcgatatatggagattcaatacgagttccgctccgttcaaccgcaccgaaggtcgtttgcctgtcttctccatgaaatagtcggcaatggcatctttcgctcggtaggtcacgaatttggaatgtttgaaacagtcggaataggtgacggagtcgatcgagaatgtcgtttcgggagaaagcagggtatcccattcgaacgctttcattttttcatagacttcgtcggggttcgatgcttcgaatttataaataggtttcagtattctcagagctgttcgacaggccaaattggttttgtaaagaaggggcttgtctccgtggaaggataccattcttcgacctatttctatatcctcggctcccagattttttaattcttctgccagaacatcttcgagtccttgaaaagttttcgctacgatttcaaatttttcggtattcacgatggtgtgtattgtatttatttcttatggttttgctttggcttgtacaaggcgttccctgggagctacgttttcggtaacccagatgtttccgccgattacagcaccttttccgatggttattcttcccaatatggtggcattggaatagataatgacatcgtcttctatgatgggatgccgggcgatacccttaatgggattgttgttttcgtccagtggaaaactgcgagcccccaacgttactccctgatatagcttcactctgtttccgataacggaggtcgctccgattacgactccggttccgtggtctatggcgaaatattccccgataacggctcccgggtgtatatctattccggtttcggagtgagccatttcggtaatgatacggggaatcaaggggacgtccagttctaacagtttatgggcgatgcgatagttgcaaatcgcccggatagcgggatagcacagaataacttcggctttgttttgtgctgccggatctccgttgtacatggccgtgacatcggtggataggatgtggcgcatttcgggtaggaaagtgataaagtcgatcgctttctgttcggccgattcctgtaaccgttttaaatcactgtctgtatgatcggtatttttttggaataataatcctgctgagatttgtttgaccaatacttcgaaaagtttttcggtattgatacccgtgtggtagagcaaattttctttgcttacgtcggggagtccgtagaatcccggaaaaatgagcgaccggcagagcgatatgagttcttgcagttgtttttcggagggaagtacttctcctctgcatcgctggtgatgcaactcttcgagagaaagaaaatcggatagtttttttacagtctctttcagtctgtctgcgtattcgtagctactcatgtgcaaagatgggtattcgcattttgtgcaaagataacaaagatagccgataatagtgcttttacggaatgatttcttaggcgttttggagaataagaatcgattccggaccaatattcatcagaaggtcgatgatactcaggtcgggttggaaaccatatttttcggagaatacctgatagtagggtttcggttgtacgggtaagatggtttcggcttttcttttcttggggtgtatggcatctcttaggtctgtttccccgggagcaggttcggagtaagacgaactgtattctatatgcggttcaatacctatgaggttgcatacggtgcggcgtatttcttcattgaaatccaacagaaattcgtaccgcttctcgaagaacgggcgtatatcgtcttggtagtattcgaaaaaaggggaggacccgtaagccgaagcgatagcattccaatgcaaatgcctccactctccgtggtcagagatacgaatgtctttcgtaggacatttaatcgtatcgggtttgacgatagggacggacagtgccaatagtccgttcgccccggctatgtggcagcggttccgataagtttgtttcgtatagttacaccactgttcgatgactatccgatcgtatcggaggaatgatgcgtagtaggataccggagcgaaataggcggtcgatagatatactgtactcataattcggttttgaagaaacgatcggtgcgtagcgattgccaaaacggtttttcgggatttctcgaataacctatgcatacgcctttaccgatgaggtgggagtggggaagaactccgaaagaacgggagtcggacatgccggctctgttgtctcctattacccaataatagctttgagtgagccgacatgaggttaattccttcccgttttcatagattttcccgttgtcgtactctactttgcggttttcatatcgggtaagtatgcggtagagaaactctgcattttggggagtgatgtgtatttgttcattttttcggggaagggcgacttcataaaaatctcttttcagaaataccgggtagagtagggagtcggccgatagttgtctccttactttttcgtagtcataccgggagagaaacagtaggcggctgtctttcaatttaccttgctcgacaaagaaagaattgttttgtctcatcattcgatttacccgatgttcgagggaatcgggcgaaagataggcttcgaggataagaggtggctgggcgacgggcttgtgattaacgaacagtttgttacctgtacttttgatcgtgtcgccgggcaaacctatgcaacgggcgatggcaatttcggttacacccgattgggtttgagcgatttcgggtaattcgaataccaagacatctcggtatttcgggtttcggtttccccaccgaaacgaccacttatcgacccatagccggtctcccggcaacaggctgttttccatctggccgggagtaatgcgatagggttctatgatgaaaaaacgaatgaaccatacactcccgataatgatgattaccgtgaagaaaatcgtacgtatggtttcttttttcatgcttatggcataaaatatctatttgtaaaaattgagacggtttcttagttcacgaggctatccaccgaccggaacattcggttgaaacggattttcccgtcgaaaagtcctttatctttgtcaagcgataagaatacgaacataggtttgcctacgatgtggtcttcgggaacgaatccccagtagcgggaatcggccgatttatcccgattgtcgcccaacatcatgtaataatccattttgaaagtataagagtcggtttcttttccattgatatatattttgccgtctctgacttgcaggtcgttatgctcgtagttccttatggggcgttcgtaaatgggcaggttttcgagggtcagtttcaaagtggctccttttttgggaatccataccggcccgtaatcggagcgggtccatgtgttcgagcgaactaatgggtaggtctgacctccgaagaatccgggttctcctacaatctgttctatcgaaggatcttttttcatcatgtcgatcatcgcctgtgtcaaaggcagttcgtaaacgggattcatgcttccgtcggggttggggagaagcccccagctttcgaggttcatacgggcgttgaggctcgatacgtcgataggtacacggtcttcgacactgataccccatttttcaaagtcattgttaccgagatagcgtccgttggttctaaccaaatagtttaactgcatgtttttgggacggggttgtttcactccgtcgatgtagatgtcgttattgacaatgctgaacgtgtcgcccggtaagcccacacatcgtttcacatagttttcccgacgatcgaccggacggtaaataatatcgccgtacagagccttgttgcggtttacggcttcccggccttcgaggaagcacagggtgtaataatccgggttgggttgtttcacggctaccgtatcgcctgccggaaagttgaagacgacgatgtcgttgcgtttcaccgggccgaatcctttgagacggtggtagtcccattggggccattcgatgtaagatttcgtgttgagaagaggtatggtatgctgggcgagcgggaagtgtaacggcgtgttggggacacgagggccgtaactcatcttgctgaccaataggaaatcgcctaccaatagcgatttttcgagagaagaagagggtatctgatagttctgaaagacgaatataaagatgaaataaaccaacactaaggcatagacgatggcatcgacccattccatcaccgttcgaacgaccggatttttactggttttccaccacccccacggaatatattgggtgagatagatgtcgataagtagtaacaggccgaacaatacatagtaattgtttagccaaatagtccaccctatatataacaaagctacgatggagaaacgtatccagcgagtttttttcacacgtttcaatcgttctgccagactgtatttgtcgttggttgtcgtttgattcataacggttatatgttatttgaggaatgagaataaatcttgcatggtgagaaatccttttttcccgacggtaaattcggcggcgacgacagccccgagggcaaacccttttctgtttttcgcctcatgggtgatgcgtatcgtatccacggcactgtcataggcgacggtgtgtgtaccgggtatttccccttcgcgtcgggcggtgatatgaatactgtcatcggcgaccggcatattttcgctccacgaatgttttgcatcgagttggccgataatatcttcggccaaagtaatagcagtcccgctggggtgatcgagtttatgaatgtggtgtatctcttctatttctaccgaatattgggggaaatggttcatgatacctgccagatatttgttaacggcaaagaagatattaactcccaaactgaaatttgaggcatagaaaaaagtctggcctttctcgcaggcctcgcgtatttccggtaagtgttccaaccagcccgtagtgcccgatactacgggtacgccggccgcgaaagcccgccgataattgtcgacggcgaccgacggagccgtgaactcgatggcgacatcggcgcttttgaatgaaactgaatcgaaatcttcctgattgtctttgtcgatgcgacaaacaatctcatgcccacgggacagagccgcttcttcgatggcatgtcccatttttccatatcctatgagtgctattttcatatcgaacttctgttacaaaacatctcggtttgtaccgattaattcaacaaggtttgtttaatttgcagataatgcaaagataataaaagatgagagcagaggcaaacggaaatcttttttccggcttggctatgccgaatcgtatcttatctttgtagtgacaaagatagcgaaaggtgagtgtagatacaaatggaagtttcatttccgatttggttataccgaaccgcatcctatcttcgtagtaacaaagatagcgaaaggtgggagcaggacaaaacaaacttgtttgtttttcatttatacgcttaaagatagtgaaaggtgagcgcaaaggcaaatggaaaccacatttccgacttgactctgccgaaccgtatcctatattctacaaagatagtgaaagtcaaaaaattttcgtcttaaaacgtttttatggaaaagctcatgcaatatatctggcaacatcggttgttcgaccatacgaagttggtcacgacggacggtcgtaaattgaggataatcgataacggacaattaaataccgattcgggtcccgactttttcaatgcgaaaatttctatcgacggttgcgtatgggcaggtaatgtggagatgcatcgacgtgcatcggactggcggcggcacaatcaccatctcgacccggcttacgattcggtggttctgcatgtggtcgaggtagccgatacgccggtttatcgcacgaacggagaggagattcccacgttggtgttgtcgtgctctccgtcgtttcgttccgattatgaaactttggtttctcattcttcctcgcaatcttgcgccccccatattgcggagttggggccgattgtcttgtccgactggatttcttctctcgctatcgagcggttacaatcgaagtcgcagcggctgcacgattggttggatttgtataaaggaaattgggaggaggtctgttatgttgtcgtctcccgcagtatgggattcggtatcaacagcgatgctttcgagcggttggcacgtagtcttccgttgcgatttatgcaaaaacatgccgattctctgtcgcaagtcgaggctttcctgttcgggcaggcggggctgttggccgagggcgagtgtcccggagacgactattatgcgagattagtcaatgaatatgcttttttgaaaaataaattcgggctgacaccgattaaccgggacagttggaaattcttccggttgcgtccggctaatttccctcacagacgattggcgatgctggctcaatatattcatcggggttttaatctgttttcccggatttgcgaggcgggtaacgaagaagaattgcgccgaattttcaaggtggaactttcggggtattggaccacgcattatctgttcggacacgtgtcgcccgaatccccggtcgttttgggtgagtcggctatcgatattgtgcttatcaatgcggtagcacccttactgtatgcctacggtatgtatgtcggcaatgaagatatgaccgaccgggctctctcgttactcgaatcgctacgtcccgaaaagaattcgatcgtgcgtcgtttttccgatataggaatacgggtgacgaatgctatggaaagccaagctgtcatacaattgaacaacgagtattgccagactcataaatgcctttattgccggataggtcataaattactttctcgttcggcgatgaagttggggtagtgatggtgacaaagatagtttatcgaatatagaaatacccgtagcagacaaaggcgtccgccacgggtatggtcgtatgaaaagatagatagttttgtctaatagttgtcccttgccggttcgaaaaacgagcggggttcgaggcaagccgggcatcgtgccggagctacgctgccttcgtagatgtatccgcagttacggcattgccagcggataggcgcttcgcgcttgaatatcgatccgttttcgagtcgttccagaagtttgcgataacgccattcgtggaaggcttctacttcggaaatcattttgaatgcagtcgctacgtctttaaacccttcgtctatggcgaccgattcgaaatcgttatatagagcagaccattcgagtttttctccttcggcggcttcgagcagattttcagccgtattgcctatacgtccggccggatattcggccgtaatggagaccattccgccttgcatgaatttgaagaatcgggtggcatgtgccaactcctgttctgctgtttcggcgaatatgcccatgatttgttcatatccttcttctttcgctttttgggcgaataacgtgtagcggttgcgggcctgtgattctccggcgaaggctttcagcaggttttgttcggtttttgttccttgaatagatttcataatcgcatgttgtttttgtacagtaaaaacagtatgcggtgaaaaaggttcaaaaaaagagccgcattttgtcgtgcggctcttctattgtcgtgtagacaatctttatttcatttgcggggtattatcggtgtggggataatctatcgtgtagtgaagtccccggctttcttttcggtccatagcttgtcgcatgacaagatatccggtgttgatcatgttcctcaattcgcatatctctttggaggctttactgcgtttgaagaggctttcggtttcttcatacagaatatcgagcctgtcccatgcccgtttaagccgcaggtcggagcgaacgatacctacataggtactcatgatttgtccgacttctttgacgctttgagtgataagtaccatttcttcgggcgattgtgtcccctcgtcgttccattcgggaatgttctcctgataggagaagttatcgattactttaagactatgtttggctgcggcatcggcataaacgacagcttcgatcaatgaattggatgccagccggtttcctccgtgaagtcctgtgcaggcacattcgcctacggcatagagccggttgatggacgagcgggcatccaaatcgactttgatacctccgcacaaatagtgagccgcaggtgctacgggaatgtaatcgcgtgtgatgtctatacctaaaccgaggcatttttcatagatgttggggaagtgtttttttgtctcttccgggtctttgtgagtgacatcgagataaacatggtcatcgcccctgtttttcatttcgttatcgattgcccgcgcgacgatgtcgcgtggagccaaagaaaggcgaggatcgtatttttgcatgaactcttcgccgtcgagtgttcgcaatacggctccgtatccccgcatggcctcggtgatgaggaacgacgggcgatcgccggggtgatataaagcggtcgggtggaactggataaattccatgtcttttacggttcccttagccctgtataccatcgctatgccgtcgccagtagcgacgagcggattggtcgtggtctgataaatagctcccacgccgccggtcgccatgagggtgactttggagaggaatgtatctaccttaccggttttcaaatcgagcacataagctccgtaacattcgatgtcgggagtctgccgcgtaacagttactccgaggtggtgttgcgtaagaatctcgatggcgaaatgcttttcgaaaatagtgatgttggggtgttgtttgacagcccgtatcaggctgtcttgaatttccgcacccgtgttgtccttgtggtgcaggatacgaaattcggaatgtccgccttcccgatgaaggtcgaattctcctttttcgtttttatcgaaatcgaccccccagctgatgagttctttgatttgcgaaggagcttcttttacgactttctcgactgcggcgcggtcgctgagccagtcgccggcgatcatcgtgtcttcaatatgtttctcgaagttgtctaccaacgtgttggttaccgaggctacgccaccctgtgcgaaataggtatttgcctcctccaattctgttttgcatatgagcgccacttttcctttgtgtgctactttcagggcaaaactcattccggctatcccggaaccgatgattaaaaagtcgaatttttgtatcatctttttctccaatttttagaaaatgcagaatccattcttcatttttccagtgcacaaagataaaaataattgctacaagatgtacctttgcacccggaatctgtttcgaatagttagaatctgttacatttttcgttagggaagatgaaaattacaggtgtattcaagtcttttctttggggctgcttgacgaaatttaggacggtatttctcgttataaagagtttatgacatttgtaatgtatagtgacatcttaaaaaatagaaaaaaaataatagttttgtaataatttggtaatcagtttgttgttgtttgttttagaagtcttcatacaaaatgatggaaaaaattacagggggcatgcagcaaaataaacgacatatacatctattttaatgtaaccattaaagttgtattttagggaatgattatagggttcgatgcaaagagggcgaatgccaattttaccggattggggaattatagccgattcatggtagatacgatggctacatacggcgatgaacataagtaccgtatgtacattcccaagcagtgtaaaaatgcttcgtatgactcgcttttaaaacataaaaatgtctcttccatattgcctcgttcttccgttatgaaacgtttcagggctttgtggagaaccttttttattaaacgagggctgttgcaagacggtgtacaactttatcatggactgagtaacgagttgcccgtggggattcatcgcacaggaattcgtagcgtagtgacgattcacgatttgatatttcttcgttatcctcaatattatcaccgtttggatagaatcatttataaccgaaaattcaattatgcctgtcgtaaggccgatcgtattgtagcggtgagtgaatgtaccaagcgggacatagttaagttttacggtatttctcccgaaaagatcgatgtcgtttatcaaggatgcgaccctgttttcgcccgtcctgtttctaaaaaagaaaaggatcgtgttcgcgcggcttacgggttgcccgaacgtttcattttgagcgtgggaacgattgaagagaggaaaaatctgctattggcggtaaaggctgtcgaaaagttggacgacgttcatttggtagccatagggaaaagtaccgattatgctaaaaaggtgcaggattatgtagaggctcatggattggaaaatagagtgcatattatccataatttgaaattcggcgatttgccgatattgtatcatctggcctcgttgttcgtatatccttctcgtttcgaggggttcggaattcccattgtcgaagctctttcggcaggggttccggttatcgcttccaccggttcctgtttggaagaagccggcggcgaacactcgatttacgtcgatcccgacgatgtggaaggtatggcgaatgccatgaaaaaagtacttgccgacgagcatttgcgtcgggagatgatagaaaaagggaaagaatatgtggttcgtttcgatccgaaaacgttggctgacgagatgaatgccgtatatctgaaatgttttgacgataagacctttaccgaagataggtttgtgcagacttcgtcgaacaaacggacaaaaatttctcactatcttccttttttctaaccacgttcgaggggtatttttacgttaaatcgagcgggaattagcttttttgttcttagcggcctatttgggctacctcttcttatgtgataaatcttttttaaaggaagaataactctctgtgtacatagtatagtgcgaaaaaggaagtgctatgaaccttctcccctgtgttttgcattgcaaaatataggggagagaccgaagaaacgatagtttctgaggagaggggttagataataactatgatgtaaaacgctccctgttggattgaacttgttcaatttttggaggaggtgtcacgcagtgacggaggagttgaaaaacaccatctcgtcaggctgtttatatcagaaatttaaccccctcgccctatgggcattccccctatattccttaccggaacacaaggggagaggttgagatatattcctctttcgcctctacttcgattttgtgtgcaataccccgcaatactactgaacacggctgggagagaggattaaaaggggtatttcctgtttcagcataagggtagattttacccttctccactacaatataagagagggagcaaataaattgtcggataatactttgtctaaatgttcgatatatgttgtttccaaaagggcaacatcttttttttactccaaccgtggcagccgaagggtagttttcggtcatttagggcgtaacattccgaaggatttttatcgaacgaaaatcggagcgcttctttccagtcgggaattttcagtcgctctttttttcgattgacttcgaggctccaaaagatatcttcgttgtagaaatcggttctggggtgggagaggtagcaatctatttcggaaaccatttcccgagcgatttgagcgaagagttgcgtgcggcgcagcgacagccctccgtttccgacccggtaatagatgcggctgtaatcggacgagccggagatgtaacaaaaaactctttttaggaaattgaatatacggtagtatagttttcgatatttaggcttgggtatccacggagcccctatgtagtcgtatcctttggaacaccattcggatagacgatcggaaaatacccatgcgtcggtttgatagatgagtatatattcccattgggcgaaggtttcgtaaaactcgggcgacatcatgagtcggttataaccggctattcctttgaaataagtatccgggaagggtacgatatggtttgccggatagtcgcgaacaagcgatgttatgtcgagcgattcgggtttgacaaaacatttgggataggacgacaatatgtcgaaacattggcgcagggcggcatgttccgatacggtcagttgtgtcgtgtaaaccggtatgacgatgatcgcttgtttttcgctcatgcttttttcgaattgatgatagagataaattcctcggcgaatgttggtatggagaagcggttttcgaccgatttcagagcgttttgtttcatctccggcaaatgccctgtttgtcgcagtaaaatgatttttttggctaaatccccactgctttcccggttatacagaaatccgttgtatccttcttttatcagttcttgcccgaatggtttgtcgggaacgatgaccggcagaccgcatttcaatccctcgacgataactcgtccgaagcattcgaacccggagcataccaaagctgcatccgcttgtatgaggtagtcgtgcgggtgaacggtgtgtgcgacgatcgatacgttttgtcgcagattgtattcggtgattcgtttttcgagttcttgtgcataacggctgttatttccgccgatgagtaaaagacgggtgtcgggatatttttttacgacttcgcgcaaagcctcgatagcgatgtgttgccctttattaggttcgaagtttcctaacatacctatggtgaagctctggtcgggttcggtacgtttgggcggattgacttcgaccgattgataaacgacatcgattttttcgggagaggatagtttgttcgtatagtatttccctgcaaagtcagaaggtactaatattctttgcgaaagggagcttatcttttctaagcaactatcttcgcagaatagataggtcaggtttcgggctaattccggaatttcgtgaatgaaccaatcgtgcggaatattttctgcatgggaagctatggctccgatgggggtagccaatgtattcgttatggttatatcgggcttgatttcccggatatagtcgcgtgttttgcggattgccgaatgctttttcagattgaaaagcaagcgtttccgccagttacgttttttcggacgcacgagccaccacggctggcgaatgaaagcatatcccgacaagtagggtcgggtcatttcccacagttcgtcttttgccgggaagaccacatagatttcccatgattcgcgagcttgcttcaatcctttgaccaagtccagcaaacatcgttccgcaccgccgttcgcccgttttccgtgagaaaagaagagaatcttcatgtccgttttcattttatttttcgggttaggagataatatcgagccgccaattttccccagaactcactacgggcataggcctttaacagcttgcggtaacgtcgtgcaggccgtcggtgtaacagatcgggaaattgtttttctatttccatagcccttcgggcgagtcggggtgcttcttggaaccaccgtttgctcaataacagaacgatcgcacctaattcgacatttgccagagcttcttccacttggggataagtgggtttgtcttggtagaaccggcgttgcagttgcggatataattcgatgtcgcgagctttcttttcggaaaaagatccgaaagaaatggaatcattacgaataacatagtgtagcaacgggtgggattccagaacgactattttgtttgcgaaataggtcagttgggaagctaaataggcatcttcgccataattcaagcctttttcgaagtgtacttctgcataaagagatcgtttatgcagataggagcaaaccgaccaataattgcgacagaatgccatcgattgaaaaaaggagaccgaatcgtaaactcccggagcggggcgggacgatctttttttcttttcatctacatagtcgaaccaaaatggaaagaccaccatgtcagcggcgtcttctatggccttattgtagagtagttctatggcgtcgggttcgaggaaatcgtcaccgtcgaggtgttgtatatattcgccttgtgcggcttctattcccgatttacgggcgtaggcaagtccttcgttggatttgtcgatgacgacgatacgagagtctttgtcggcatatcgggcgatgatttccggcgagttgtcggtactgccgtcattgacgacaatgatttctatgtcagggaatgtctgggcgacgaccgagtcgagacatttttcgagttgtttaccgacgttgtagacgggtatgacgacagatactttgggtggcattatttgattttctttttgcaaatataatattgggcgtacaatcttcctaataaaccgctgcgagcataaagcgtaaacagtttatgaaaggccttgatttggggaatacgtttgagatcgggatactgtttcaggatagcatgagattcccggctcagagtacgggcatccttaaaccaccgtttactcaatagggtattgtttgcctgtatgcgaatggctccgagttctttttgtaaagaactgtattcgggtttgtctttgagaaaatcgtttaccaatgaagggtagagaagaatatctcttgctttcttttcattgaaacgactgttggtaatggagctttcccgtatgatataatgaagaagaggtttactcttcaatacggagattcgggaggaaaaataaactagttgcgtggtgagaaaaacatcttcgccgtaattcagacccttgtggaatgtaacaccgttagcgtagagacttcgtttgtgcagatagctccatactccccaatgggctttggaaaaagcgattgccgaaaagaactccgtgttggtaaaatgctcgtcggctatctctatggaacgctcggatttcccggattcgatatagtcgagagagaatgggaagactaccatatcggcatcttcttctttggctttacggtagagcagttctatggcatcgagttctaaataatcgtcgccgtcgaggtgatagatgtacgttccccttgctgcctcgatgcccgatttacgggcgtaggcgagtccctcgttggatttgtcgatgacgacgatacgagagtctttgtcggcatatccggcgatgatttccggcgagttgtcggtgctgccgtcgttgacgacgatgatttctatgtcggggaatgtctgggcgacgaccgagtcgagacatttttcaaggtatttcccgatgttataaaccggtatgacgatagagacggcaggcatagttccgttaggctttgatttttcctttgtgtacatagtagtcggtatagagctttcccaaccacggccaacgtgcatacaggcgaatgagtttagtgaatcttcggacttcttccagttgttccagagccggatatttggcgagactctctgccataaatcggcagcgctccgtcattccttcccgccagtttttaagtaacagcaggaagtaagctctgaaccgtatgtaaacgatgtcctctgtgaactgcctattttcgggcgtaccttcgagaaaggtttcgatgaggttggggaatagcaagacgttttcggccttttttcgggtcattcctgtttgtgtgacagaactttcccgaatcacatagtggtacagaggcttgtccctgagggttacgattttttttgaccggtaggcgatttgtatgctttggtaagcgtcctctccataagtgagattttgcaagtagtcgatgggaacagcatgtagatcgcgacgttggaaaaggaatactaaattccaacggtagtcttcgtgtgccatcgtatggatagccgagatattattgtattcgtcttgtgtccaaaatgacggttctttttgtccgcgaggtgaatctatgagaaaccgcataatgactatatcggcatcggtttcttctgctcgtttgaaaagcagttcgcaagcatcgggttcgaggaaatcgtccccgtcgagatgttgtacatattttccgtgtgctgcttcgatacccgatttacgggcataagcaagaccctcgttcggtttgtcgacgataacgatacgggaatctttccgggcatactgcgtaatgatatccaaagaattatcggtactgccgtcgttgacgacaatgatttcgatatctttcaaggtttgaccgataaccgaatcgaggcatttttcgagatgtttctctatattgtaaaccggtatgatgacagatacactgggttgcataggaccatgcgtttttatattcgtatttttcctttgcgaatataatatttcatatacaattttcctaaaatagaggagaaactatatagatgaatgagcttggtgaaccgttttacttcggatatctctttcaatcggggatattgtttcaagctgcgggacataaatcgacatcgagctttcatgccggtttcccaattttttaacaacagaataagatatgcctgaaatttaatgtaaacgatgtcttcccgaaacatttcgttatcgggagtctgttgtaagaaccgttcgatgaattgcgggtataattctatactctcggctttttgctgcgtcatggcatgttgcgatacggaactgtcccggacggtgtagtggtagaggattttgtcccgtaatgtcactatcttttgggctcggtaggtcaattgggtaatttgataggcatcttctccgaaaataagctgtggagggcagtccaccggacgatcgaacaactctttcctcatgaggcgagaccaaagactccatcggaactcctcgtgcgccatcgtgtgaatggctgtaaccgggtcgtattcgtcttgtgaccagaaccggggttcttctttatgctgaggatactcgatgtcgaaccgcatgatgaccatgtcggtgctggtcgcttgcgcttttctcagaagccgttcgcaggcgtcgggggctaagtggtcgtccccgtcgacaaacagaatgtacagccccgttgcctgcgctattccgcaatttcgtgccgatacgacccctccgttcgttttgtgaatggcgacgatacgggaatcggttcgggcatatcggtctataattcgggacgagtcgtctgtactgccgtcgtcgacaacgatgatttcgatctctttcagggtttgaccgataatcgagtcgaggcatttccctatatattgttctatattgtacaccggtacgatgacagatacactgggttgcatatttagcgagattttataccgaatatttttttgaagcggcggacgattttgtatttcgatcttttgagccgatagctccaaatatcgtttttatagggagtctttttcaaatagtcgaaatacagacggctttgcgggttagggcagtcccaaatagaccacggtttcattttccccgtgtagtgaacgatgacggccctgtctctttcttcgggatgtttgatggcgttctcggtcgtgaagttatacctttcgggcaactctttgactcggccacggcacacgatattgatgatatcttggtcttggaattgtatctgttttcccagcgagatagttgtttcgcatagtttttcgtatatcttttcttcccgcattttgggtatattcaggagtaatactccggcattgatatacagttcgtcggacgagaagcctatctggggtttatagttgatattttctacccacaggtcatgagcgccggcacatagatagtcggtgatgtctgtgtcccataacttttctaatgagccgtttaccactaaatcgccgtcgaggtacagtgctttgtcgagttgcggatatagttcgggaatgatatatcggtagtagcttacaggagataccaaataatctatattacggtgaaaagaatcgaatattttttctgtaatgagttgataatgaatggagcagttggcgtattgtttttctactcgactaaaacgcctcttattcttttccgaaatatagtctgtcaataaataaaaatggcaatgacggttcggggtatttgtcaagacagataccattgttacgcaataatgcgatgtgtaactgtcgttcagggcgaaaaatatatggaggttgtccatcgaggtgttcggttttgattagaatcgatatatgaatcgaaagttttccaatttctattatgacaaagataatatttataaatagataagagaaagctatcgtctgaaatttccggttcggtagaaaatccgtagggttagcgatgagattcttgtcgataatcaccggacttttgggaggggctgattcttgcttaattaaaacctccttcctggccgtgccccacaatactacgggacacggccaggagagaggttgagatgtattcccctttcgcctctgcttcgattttatgtgcagtaccccgtaatgctaccggatacggtagagggagaaaggatacccaatgttggtattacaccttctcccctgtgttttgcattgcaaaatataggggagagaccgaagaaacgttagtttctgaggagaggggttgagaaatattacaaggaatttttttgacagtgtttttttaaccccctcgtcctgcggacactccccctatattccctaacggaaacacagggggagaggattgaaagtggtgtttcagtttcggtataaggatacattgtgcacttctcccctgtgttttgttgcgcaaaatataggggagaaacagaggagcgatagcgacgaagagggggattggaaagatgacatgccgagaattgtttaaacagaaaaagagcagtggattccactgctctttttctgttggcttaccaggattcgaacctagacaaacagaaccaaaacctgttgtgctgccattacaccataagccaaactctatactttgagggcttatcctcaaaagcgaggcaaagataatcggtttttatttctttgccaaattttgagcgaattattttgcaatgagcagataataattctttttcccgcgttgtacaatgatatatttattgttcaataggtaagttgcatcgatcttcgtgtcgggagcggcgagtttctctttgttgatggatacgccgccgccttgtgtcagcttccgcatttcacctttcgacgggaatatggcagctacttcggtcgtcagctctacggccgagatgcctgcaagaacggtattgcgggatatttcgaattggggtacgccttcaaacacggcgagcaaggtatcttcgtcgagtttatggagttgctccgatgtcgagttaccgaatagtatgttagaggcttcgacagcggcttcgtaatcggcttcggagtgtaccattacggtaacctctttggccagacgtttttgcaacacgcgcaagtgcggagcttcgtcgtgctcggcactcagagcctctatttcttctttggagatcgatgtgaagattttgatgtagcgtttggcatcctcgtcgctcacgttcagccagaactgataaaatttgtaaggagaggtgtaacgggcatccaaccatacgttgcccgattcggttttcccgaatttcgttccgtcggctttggtcacgagcgggcaggtgagggcgaatacttccccgccgttcgtgcggcgtataagttccgctccggtagtgatattaccccattgatcagatccccctaattgcaacttgcaattcttggtctcgtagaggtgcaggaaatcataaccttgtagaagctgataagtaaattcggtgaaggagagcccgtctctggcttcgccgttcagacgtttttgaaccgaatcttttgccatcatgtaattcacggtgatgtgtttacctacggtacgggcaaaatcgaggaatgaaaagtctttcatccaatcgtagttattcaccagttcggcatgattgggagcatccgagtcgaagtcgagaaatttgctcagttgttttttgatacattcctgattgtggcgcaaggtgttttcgtccaaaaggttacgttcttgcgattttcccgacgggtcgcctatcatgccggttgcaccgcccaacaacgctatgggtttgtgaccgcaccgttggaaatgtcgcagcatcataacgccgcataagtggccgatgtgaagcgaatcggctgtggggtcgatacctaaataggctgtgactattcctttttcaaaaagttcttcggttcccggcatcatggtgtgtaccattccgcgccattttaattcttctacaaaattcatcgaatgaaaacttaatttaatgttgattgtttcgatgcaaaagtacgactctttatcgaaagaaacaatcttttgaaataaacaggccataaaaatgccgattatttgttttttcgattattcggtttattttaaattataattgaacgatttgattaactttgcgcaaacctattttcagtattcgttatggggaaaaatgaaccggaggccaagcaatggtttgccattcgggtgacatacagccgagagatggcattgaaggaatatttagaccgctgccgcatggaatcttttatacctatgtcgtataaggaggtaataaaaggtgagcgaaaggtgagaaagttggtcccggttattcataatcttgtttttgtccggtccactcgggaaaagttagatgagataaagcgggatatctctttgaaagtccccatacgctatatcatggaccgggaaactcgcaggcctttggttgttcccgacaggcagatgcacagctttatagcggtggcgggtgcttatgacgaacagatcgtttatttagacccgacgatcgtctctctgcgggagggcgatcgggtgcgtatcgtcggaggagtattttcgggggtcgagggtattttcattcgtattaagggagatcgccgtgtcgtcgtatcgatagaaggggtcatggctgtggcaacggcatttgtacatccgtcgttgatcgaaccggtattgcaaaagtaaaatattaataaaataatattatgcttgaccaatggtgtgaaatatttatatatttgcatttatttaataaaaaataatgatatgaaactattgatgaaaagagcttttacagtggttttagctgcggttttattattcggttgcggggaagacaacaacaaaacaggtggtaacgagttgactcctcaagagaacaaagctaaattggaacagtgtgcgatggaggttctgggaaaaattaatcctcaggaccataaaacgttggtagagactatcgatgcgtttgcctataaagccgattatggcttgtttgaagatgaaatcgggccgactccgggtgaaggtatcgaacctaatccgatgggaatgatgagtgtaattcgtaaagctgtaacgacttacaatcccgttgtgttgagtgtattggctaccgaagtggattatatagctattccaacgggtatttacacattcgatgaagttgcccgtgaatgggtggagactccgtcggccgaggtcctcgaatttgtgtttgaagtcgaaggtgtcgagtcgtccatctcgatacgaaaaagcggaaaagaaacacaaatacaaaccgacgaaaatactatcgtctttgttcctgaacatgtgacgatgacagtcaataagggagctgataaattggccgaattgtcggtaaataatactacattggatatcaattccttgaaattcgatagcgagatagcgttgaaaacaaatgccgattatacgtgggcagtccatgttgatatatcaccttccgaagctgtggcttctgcttcgatggagatcgcttctgccaatatcgtgagtgttgttgctggactccaattagatgcttccaaagtcaatcctcaaatgacagaagatgatcttattgcttccatcttgtcggctacgactacatcggttgtgaattctcagttgatggtagctggtacagctcctaaaattcaagagatgatttatgccttgaataatatcaatgcttctaccgataaggaatatgctattgccgaagctgctgtatacaatcaatatatggacgtgaacatgcaatacacaggagacggggttccgttcgcctcagtcgaggcacagccttatttggaatatgaatatagttatggagacactcactatgaatattatgaagtggagccggtcattgtatttgcatccgataattcgagatacagtttcgaagagtatttcaatgaagccgatttcggtaatgtacttcaaagtgtaatgacattgtgcgatcaatttgtttcgttcgtgaaatattgcaaataagaaattaataatttcagataaaaagaggcgcttaaaaaagcgcctctttttttactcttgacaatcccgacggacaatcagatcgtacatttttacaccatatccacaccaaatccccaatcctccctgtacattggattttaggtttgtattgctggggaataacggattttggccattggttatttcattttcataactgttccaaaagtcgaaaccatgctgaggtatttgggtaaattttacttgtacggtatcgtctatgctataaaatgggataaatttagtcgtgtaggtaaaatgtactcctttataaaccggaatggctgtttgactgtctttaacgatagcatcgtctatggtaccgagaaaagaagaatagaaccggccctccttattggttacccgtgtgaaaaatttgtaatagttcttttccgaggagtcgtcgtttatataggcactgatttgaaatagggtgtcattgtcggcgctgcgggttacttttatatcagataaaggaacgggacgaggtatcgtagtaacggcagtgaccgtttgccccgaatattctactgtgagcgtgtaggtttttccgggttcacccgtcatcatgcttccccgatagataaacggcggggtataatcggtatctatacgtccggtaagtacctctgttgtttgcccgtcgctcacggtgacttttgcccagcggataggaatttctgagaaagccagactatctactaccgagttaagcgggcgggtttgggaaaggcacacgtaggcgacatttcccgattctatccaaccgtctactacaattttcggttcgaaatcctcgacctcgaagtcccatttcactttacaactgccgagggtgactattgatatcaggagtatgtaggcacacttgctcatgaaagtttaaaatttaaatgaataactgatagagggtatgattccgtaaatggattttcccctcttacggataatcagttggtcttttttaccatttttatctttgtcttgtatgatgtcgacagccaaatatgcaggattatttcggttgtaagcattatataaggagatatttataacttgctcggtgttcttctttttggaaatccagtaattcgccgatagatcgagtctgtgataagccggcatgcgcccgccgttatgcggtccatattcgcaaacggcattttctccgacaagatacatgctttcgggcatggtgagggcatttcccgttgcatagacaaagacggcggagcaatcccaacggcggtttattctgtaattggctacgatcgataggtcgtgtcgccggtcttgtttggccggataaggttttccgtcgtttatttgtgctgtgtggcgatatgcccagccgagagcataccctatccagccggtcaatcgacctcggttttttcgaagcatgagttccataccgtagttatatcccccgccgatatagattttgtcttcgataatatattgttgactgatcatgtcgatgagggctccggccgattccatttggttgtgcagccgtttgtagtaaagctccgatgaaaattcgtagttgtcttggtcgagagctatgctgtacccggcagagaaagaatgcgctcgttggggcggaatgttgcgggatgccggcatccagaaatcggtaggaaatccgatactcgaagaagatacttgcccgatatattgtcgggtgaggttatagcttaatgagatccgttggttgcttcccggtaggaaataaagggcaattctcggttcgaaacctccgtagaacttgatgagttctccttttccataagtttgagtgtcgataatttctccttgtcggtaggtatggtaattgaactttccgaattgagccgttccgctatatcttaatccagcttctgccgatagacggggggagaaaaagtatttgccatttatgaatagagcgccttcgtgtatgcgatataaccgactgtccgggtcggtgtgtatggtataagcgccttgtgtttccacaatttgaggatacatgtgatgatatacatattccagcccgtatgtaccgagaaatttttcttcccgaaaggagaagatatttttatatccgtaatcggtaatttcggaaggaagccaagctgtaaattgattttgagaaatgctcagtctgtttttataccgagtgatgtaaaatgtatgagtcatctctccgattctccctaatggcctgttccacagtatcgaagctgctatattgctccatttgatacgtccttctgtttggtatatgccggtttcgatatcgaggtaatcgcttccgtaataaaaattagcggttactttatctttttccgaaggttggaatacgaaagtggcattataatcttcgaaatcataatcgaccggagtgtcggtcattttggttgtaagaggttttaccaaaagtcccagataggtttttctccccgacagatataccgaaactttctttccgaggggtaaagctaccgtagcttgcgaggcgattattccgatgttaccggaaacagtcggtttggagacgagtgtgtctcgtgtttgcatatcgagagttgcggatagcctaccgcctttggaggcgtcgaggtgagatttataaagtgtaaaggtattcatgtgcccactattgaataccgagaaaaaacccagcatgtgcatagcattgtatatgggagctccgttcagaagtatctggttgtgagatgattcgcttcctcgcacataaaatcccgagtttagttctccggtagtcaatacacccggcattagcttcatggttcttaaagcatcggtttcacccaaaaaacgaggcaaggtgtttagttcggcgacattcaattttattttcccggaaagaaggcccgacaagattttccgttgttgccaagctgttatttctacttctttcagcgtatggcgagtatctgtcgtgtcctttttttcgacagattgggaaaagctggagaagcagttcaatgcgactaataggaatatcgtgattttttgatacacagttttttcttaaaaaataatgtgagcgaagacagaagcaatttaggtatttctgtcggagaacaatccgttattcattttatgcaaagatagcgaaaggtgagtgctgaggcaaacggaaatcctatttccgacttgactatgccgaaccgcacctatcttcatagttacaaagatagtgaaagatgagtatcggaaaaagagaactcgcctgtttttcattccggattgcatcctattttcgtgttctcgacaaaggtatgtgggctcagtagataattagtgaggactgtctttttatatttctacccctatataatctttttaaccccctcgccctacgggcactccccctatattccttacaggaacacaggaggagaggattgaaaagtagccttttcttcctatgttgttttgcaactccctgcaatgctacgggacacggcagagagagaggggagtactcaattttgttactgctgttggtattgctctttctcccctgtgttttgcagtgcaaaatataggggagagaccgaaggaacggtagtttctgaggagaggggttagaaaggttgttcgattgtattgtttaacccctccgtcactgcgtgccacctcccctatatggcttcgccacacagaggaggagtttaaagtaacactctattcatttgcgacgagcagagggaggggctattttacccctctcctctatatggctaacacagttctccgtaatactacgggacacggcaagggaggaggtgttaattaattaagaatcagtctctcctgtggttatcgaaaagaatttcattctctaaaactcatcgctatccccacggattttctactgaatcgtgatgtgagtcgagtcggtaatacaagcgaatgataagcaggagggaatagtagtttagtcttattgtcgggattgctggggaaacgtaaagattcgtgagatgttttcctttatcgatttgcgtaatcggtgagtcgagagattacgtatgcgtgccgctttcctatatagtttatcgatgggcatgttgccctcgtctgtttctaaaaacaagcggtcgagtggtacggatttcaaagattcgtggttgtaatattctccgaaggagagatatagcccttctcgaatcagttgccttgcggtttcgggtttccctctgaatccgtgtataatccacagttgtttaggcctttctgctttatggatgcggattatgtcgtcgtatgctttgacggcgtgtatgacgagcggcttgtgccacttttcagagagatatatgtgatgtttgaagtattccgattgttcttcatagccgactccgcttttgagtctatcgagtcccgtctcgccgatcgccacgacttgctcgtttcgtacgatcgtttctagcagagggaatgtttctttggagcgggaggtcaggctccacgggtgtatcccgacggagtagaactttcccggttcggggtggaactcttcgggggtcgtgctgatgatggctccgtagtggtcgtggtgcgtgtgaatatcggtcggcgttttaatcgggacgggatcgtaaccgctaccgccccacgggtgacagctcaggatacgtttgatggccagccataaaccttttaacgggccgtgtatctgtatggcttcgatagcatattgagaacaggtgggtacatatcggcacgatggaggtagcatgggggaaatacatgccttataaaaacggacaggaaacaggagtatggccgatagcagttttttcatgatgtcaggacggagtttgttgcgattctattttccgggccagacgttccagaatttcaatgactttcttctctataaaatgaaaatcgttcaggtttttatcgaggtaaagaaaggctaaatgtgcggttcggctttgtcgcgacagcggttctgtcagaatctgcttgttgagccgataggcttctcttatccggcgacgcaaatatacccgtttgacggcgcgtttgaaatttcgtttggggatattgataaagaaacgtggcggagcgctttcgctgtcgtctatgcgataaacgacacgaatcggatagacgataaaagaactcccttcggcaaacaatcggtcgattgccgttcggctgcacaacttttcgtttttggggagtttgtggtcgttcatcggttttgaaaataaaacctcataagcgcctccttccggtaaaagacgattatgaggttcgggtttggagtaagaaagggtttatttctttttactttgttcttttaagaagaggtctaaggctgcggtcatcgacggagctccgggtgacggagcctcgatgtcgagtctcaggccggcatcccgtacggcttgtgccgtagtggggccgaatgtcccgatttttatgtcgtcttgtttgaaatcggggaaattcttggtcagcgatttgatacccgacgggctgaaaaacagaagcatatcgtaatcgaacggttcatcgggcccgaagtcgttgcttacggtacggtacataatggccttcgtatagttgattttatgcttctctaatacagaagtttgctctttatgtacatcggaaactgggaagaggaatttttcgccggagtgtttgagcaacgaaggcactaagtcgtccaactttccagagttcccgaagaatattttgcgtttgcgatagatgatgtatttctgtaaataaagggcgatggcctctgtcgtacagaagtatttcatcgtttccggtatggtaacacgcagttcttcgcacagacggaagaaatggtcgatagcggtgcgtgccgtgaaaataacggcagtgtactcgggtatggatattttctgctgtctgaattctttggaggtcagaccttctactttgataaaaggacgaaaaacgatatttacaccatatttttctgcaatatcgtagtagggagatttttcggaactcggcttgggctgagaaacaagaattttcttaattttcaaagctgctgtatttttagttcgacaaaattatatatcaatatacttgatctatatacccaaaataggggggtgatttcgagggcacaaaggtacacaataaaatagaataaatctaatatattgcggtaaaaaatcttaaaccctttataaataaacaagatacgagagattagatagataaataccgctgtgacgaacatgattttttccaaaggaggaatgaaggtcatcgcgagtatcgacaaggagagaggaatgcctatcaaggaattgatcgatacgaagctgtctatccatttacgggtatgtgtggcatcggtaaataaccgcccgattccggtataaatccatttttgaaagtaataataacaaaatgcgatgactcctccgcaacaaatccctattccgatcatttcggatagggagggtatatgccgacttacaagttcgaataggcagaagccctcggagatgaaagtcatgatcaacaatacggcccggagttgggtttctctcacggtagtgtcgtcgaacaggttttgtctctcctttacgttgagcgaattgcggagcacttcacccaagtatttgattccttttttgaacgtgaaagcgaacagtaagaaaacaatgagaacgaggccgacgattacgggatcgttcatgggtgtttcgggtattttttcagacgggaatccttcgggtatggcgattatggtttcttgcaggtctttcagcggatcggtctctttcaagggagtacttcgttcgaatccatgtatatatcgcggcacgaaaacctcaggagtaccggcgggcgactgggcttgcgcggtatcggcaggagtggcggtatgtgcggcggggacaggcatgattatatggctgcgattttgcgaatgtttttatcccatacgggcatgttttgaatagcgtcgacagcttcttggggggtctgcgcgacttgccacatgcgggcgtgctcctgcctcatgaagttttcgccgatggcgttatgaagcatctctatcaacgggttataatatccgtctatgttcaatatgacgatggggttgagaaacagtccgagttgtttccatgtgattatctcgaagagctcttccatcgttccgcaaccgcccggtaaagcgatgacggcatcggcttcttgcgccatgcgttctttccgttcgtgcatgtcggcggttacgatggtctcggtcaaacctttatgacaccaaccttcgtcgatcataaaccggggtattacacccaatacttcgcctccgttttcgagaacactgtcggccagagtacccatcagaccttgattgccggcgccgcaaacgcatcgcattccgttttgtgcgagaagcctgcctgtttcgcgggcggcttcgaagtaacgaggatttattttagagctggatgcgcaataaacgcaaaccgattttatctttttcattgtcacgtatttgaatcggttgcaaagttaacgctttttcccgaaagagaacccttcggcacaagcgacgttataaccatttgttttcgcgataccatttcacgcattcgttcacgcctcgttccaagctgtattgcggagaaaaaccgagctcgttttgagcatccgaaatgtcgcaaatccagttgcgttgtttcatgatacggaatttatcccgatttaatgtgctggtttttcccagcacgatagctcctttttcggcaatgaccgatacgacccaaagcaaccacactggaattttgacggggacaaccctgcgctttcccaaagcggtcgctacatatcggcgaaactgggacgaagtgtatgcttttccttccgagaggaagtacccccgccgaacgactccccggtctatggctttgaagatagcttgtaccaaatctttcacgtaaatgaaggtgatgagttgaggtttgaacccgacgatgaaatcgaatccgtatttgatacttttcatcatcaggtagtaatctcgctcataggggccatatactccggtgggacgcatgaccacgtatgggaatccttccaacgattctaaatgtcgctcggctttcagcttgctttttccgtatcgggtattggggtgaggggtgtcggtggggcgtatgggggtgaagtttttttcgtcgccgactccccatgctccgaggctgctcgtcatgatgaattgtttaggaaccatttctgtttcgacgagggcttcggtgaaatttttcacaaagccgtagttgattcgatcgaagtcatcgggatttttacattttgtaactcccagattataaacgatatagtcccatgctccgtattcccttttatgcgataatagttggtcggtaagaatttttttgttaccgtaattgaagtcgataaagcggattgcagggtcggaaagatgctcgcgagaagtcgttttgcgcacacccgcccaagtttcgtaccctcgcgacagcgcctcttcgacgataaatccgccgatgaatccgccggctccggtaatcaaaattttcatgctcataaacgctgtttgtttgtgcgtgtaaaagtaataagaaaccttgtaaatggaattagagatactgttattttgtgaaatatagccgataaactattataaaaagtttataaagaggggagattgacaatctttgttatctttgcaatatttttgtggccggaatgtgaaaataaaccggatttcgataattgacgaaatgaatctgtttttgccgtcgggcgtgttgtctttgtcgcggattacaaggacccgaggctttcggtcgagatgaaaggaaaaaattataaatataacaaatgaaacggtacaaattactgaacaatgttttggggtgggtagtcttcgttatcgcggcggttacctatatccttactttggaatccacggccagtttttgggactgtggtgagtttatagcatcgggttataagttggaagtgggtcacccgccgggtaatcccatatttatgttgacggcgcgattctttgccaattttgcttcttctccctccgaggtcgcctatatggtaaaccttatgtcggggttgttaagcgctgccaccatactgttgttgttctggacgatcacccgtttggcgcaaaagatcgttttgcgtgatggagagacagaggagacgatgtcgctcgggcagatgattgcaattctcggttgcggtttggtaggagctttggcctatgcgtggtccgatacattttggttctcggcggtggaaggcgaggtctatgcctattcgtcgttctgtaccgcattggtgttttggcttatcctcaaatgggaaagcgtggccgacctgccgtatgccaaccgttacattattttgatagcctatatcataggagtttcgattgcggttcacctgttgaatcttttgtgtatcccggccatcgtattggtttattattaccgtaagtataaaaataccgatttaaagggttctttaattgccctgttggtatcgttcgtgttgatcgtgcttctgctttacggtctagttccgggttttgtcgaggttgccagttgggtcgaattgttgttcgtcaatgttttccatttaccgttcaacagcggagtggttttttatttcttcctcattgtcggggttatcgcttgggccatttatgagacgtatgctcaacgcagcgataagctcatcaagatttcgtttttgataagtatcgtattggtgggtattccttttatcggcgacgggtatattatcggtattgtccttacggctgcgttggcttattatttgtttactcgtaaaaagctggcggtagtcgccatgaatacgatattgttgtcgttgttcgttatttttatcggttattcttcatatgcgctgattgtgattcgttcgacggccaataccccgatggatcaaaattcgcccgaagatatatttagtttgggcggttatctcaaccgcgaacagtatggcgacaggcctttgttctatggacagactttcccggccgaaatcgctcgtgatgccaacgggactgccatatcgacaaagggcaaagccatttggaagaaaaaactgaaaacatcggaggacgaggcagaccgttatatagtcaccggatataacgaacattacgagtatcaacccgagttgaacatgctgttcccgcgtatgtatagcgataaatcggaacatatatcggcatataaagagtggactaattttaaaggtcgtccggtacaggtgagaacttccgaaggaactaaaacggtcatgaaacccacttttgccgagaatctcgctttcttcctcgattatcagttgaactacatgtattggcgttatttcatgtggaacttcgccggacgacaaaacgatatacagggacatggagaggtgcaaaacggaaattggattagtggcttcaattttatcgacaagcatattgcgggagaccagaccaatctgcccgacgatttgaagaataatgcagggcgtaacgtcttttatatgctgccccttttgttgggtctgatcgggttgttctatcaggcattttccggtaagaaaggtatcgaaagtttttgggtgacattcttcctgttcttcatgaccggtatagcgattgtgatttatttgaatcaaaccccctatcagcctcgtgaacgggattatgcctacgccggttcgttctacgcattcgctatctggataggattgggtgttgcggccgtgtggagaggattgaattatctgttgaaaacgaccgacgaaaaacccgtgagtacgattaccgctgctgtggctgcgctgctatgtttgtgtgtgcccttgcagatggtaagccagacgtgggacgaccacgaccgttcgggacgatatgtttgtcgcgatttcggtatgaactatctgtcgagtgtcgatgaaaacggtatcatctttaccaatggcgataacgatactttccccttgtggtacgtgcaggaggtggaagggtatcgcaccgatgtaagggtttgcaatttgtcttatttacagaccgactggtatatcgaccagatgaaacgtccggcctacgaatcggcgccgctgcccatttcggccgatgagtcgaaatacgcttatgacgtgcgttcctataattatgtaatcaatcggttggccgattctattacggtaagcgatggattggactatttgtatagcgatgaggattggacgaaagatgttcccggatacggaaagttgaaccatttacccacgaacaagctctatatcccggtaaacgccgatgcggccgtcgcttcgggtacggtagcgcctgagttgaaagatagtatcgtttctcgcattgttcccgattttaccaataagcggggttttacgatgagcgaaatagcttcgttggacattatcaacaccaatgccatgcagggttggaaacgtccggtttattttgccgtgacggtgggtagtagttactatctgggcttggaggattatttctcccgtaccggactggcttatcaggttgttcctttgaaaggcgtttccaacaacatcgatacggataagatgtatgacaatatggtcaataaattccgttggggaggaatcgataaagcaactcccgagcacccgttatatctcgacgagaatgtgcgtcgcatgtgcaacacgcatcgcatgatgttcggcgatttggtcgttcaactcattgccgaagggaaaaccgataaggcattgaccgcactggatttgattatggagaagattccgggttggcaagtgactcacgaccttacctccatttcgctggcgcagtcctatctcgatttgggagagaaaacgaaaggcgaggctttgttgaccgagatactcgacaattcggccggatacctgaattggtataaagacttgacttccggtcagcttcgttccgtaggaagcgattatcagaaacatctgtatatcattcaggcgatacatgaaatgagtacatcttatgagcttcccgaattacagaaaagaatagaagaaaaatttgctattcgagaataaataaaagacattcttttcgggagaggtgtcggaaaaatacttttccggatctctcccgtttttcagttatatacttgttatgtttatagagcaacccccgtttttttatcgcatgttgtttcccgaaacgatttggcgtataccgggagataaaaagaccgtatatctcactttcgatgacggtcccattccgcaagttactccgtgggttctcgatgtactcgattactacgaagtgaaagctacgtttttttgtgtcggtgacaatgtcgcgcgtaatcccaatctgtttcaggtgatcagggacagagggcatcaagtggggaatcatacgatgaatcacgtgaagggaatgtcgatgtctcccgaaaaatacgtgcggaatgtcatgaatgctcacgaccttattcaaagtcggttgtttcgcccccctcatggtcacatgttacccggacaagccaaattgttgaagaaagatttcagcattatcatgtgggacgtcgtgacgcgcgattatagtaataaattgtcgggtgagcaggtgttcggcaatgtgaaacgttatgcccgcaacggttccatcatcgtgtttcacgattcgattaaggcagagcgaaacttgcactatgcgttgccgaggacgataaattggcttagagagaatggcttcttgttcaaaaccctctgaatggcgtgagatcatacgaaacgaagccttgcgtatcggtttcgatgcctgtggtttcgcaagggtggaagaggtcgatgtcgatatgcgcgatagctaccggcagtggctcgcttccgggaaacaggcgcaaatgggttatttggacaattatgtggagttgagggataatccggcgttgttatatcccggagcccgcacgatgatttgtgtggcactcaactactatccggttcgctttcagtctggtgaaagtccccggttcgcttattatgcctatggtcgggattatcacgatgtgatgcgggataagctgaggcagttggccgtttttgtttcgtcctattctggggatacgggaagggtctgttgcgatacggctccggtgcgggaacgttattgggcggttcgtgcaggtctcggctttatcgggaaaaatgcccagttgattattcccggtaaaggctctttcttcttcttgggagaattgataacttctttggatcttcctcccgatagtccggtcgttgctcgatgtggcgattgttctcgttgtatggacagttgtcccaccggggcgttgtacgctccggggagtgtggatgcccgcctgtgtatctcttgtcaaaccatcgagaacaagggggatatagctcctttcgtagccgatagaatgggcgatcgggtatatggatgcgatacctgtcagcaatgttgcccgtggaataaatcggctcgaccttctgtgcatcacgaatttgcacccagcgaagaatttcttgctctcgatgcttcccgattcgaaacgatgacacccgatgatttcaatcggatatttcgccattcggctgtcaaaagagctaagtatgccggactgaaacgaaatttcgagatttggaagaaaaacagaaagtcccccatagaatgatgttatgtataaattaagagaggcttcgccgtggcgaagcctctcttattatgtgattgagacaagtcttatagtaagctgtcagggtcgaggttgtttttctcgatgtcgaggaaatacttgtaagtacccaccttcaattcggccgttgcggcgtcgtcgcagacaatgatgcttttggggtgcatttgcagagccgtgatcgtccacatttgggaaatgccgccttctacgccttgttgcaaggctttggctttgttgtgcccgttaacgatgataaggacattccgggccgacatgatagtaccgacacctacggtgagagccgttttgggaacaagatgggtatcgcctccgaagaaacgggagttggcgataatcgtgtcttgggtcagtgtttttacgcgggtgcgtgacgttaacgaagaccccggttcgttaaaagcgatatggccgtcgggacctacaccgccgaggaacagttcgatacccccgtaagatgctattttggcttcatagcgggcgcattcttcttcggggtcggcagcgttgccgttgagtatattcacgttttccgggcgaatatcgatgtgggagaagaaattgctccacatgaacgtatggtaactttgttcgtggtcttcgggcagattgcaatattcgtccatgttgaaagtcacgacattacggaacgaaacgacacctttacggttcaattctatcaaatgtttatacatgcccagaggcgacgaccctgtgggaagacccagtacgaaaggtttatcctctgtcggtttgaacttattgatgcacgataccacataattagcggcccaacgagaaacggcatcataggttggttcgataatcagtctcatgatttgtatataattttagctttccccaaaagtaatcattttttgggaagtacagatgtgtatgtgaaaattttgtgtatttttctaaaaatcgaaagtgattccgtgattttttaccttttttgtgtggaaaaagtgtaaaggaatcattaagtttgtaacttaaaaaaactatcgcgatgaaaacaaatctaagttctcagattaaactggatcggatacccaaaaggtattatgctcctgatggtgagttggaacttgcggctcttacacgagacgagaaagtttacaccaaaatcttcgaaggctctgaggaagggtcggtgtatgtagctcatgacgtagcggaattgatacagaaatgcaaggcagagcatcgtcattgtgtgctcgctttgggttcgggtgtcggtactcacgccgtttatgccgaattggtacgcatgtatcaggccggcgaagtcagtttctcgaatgtcatagtattcaatatcggggaatattatcctttggcagaaggagctcccgggacgatgagcctgttgaaagagctgttgctcgacaaggtgaatatcgatcccgagaatattcattcgcccggtaagttggtatcgaaagaagatgtgtaccagtattgtaaaaattacgaagaagaaatagaggcttgcggtggtatcgatttagctttgtgcgagatcggtgcggtcggaaatctggcatttaacgaaccgggttcgcagctcaactcttcctgccgtctgatgctgctcggtagcgatgctcgccacatggcatcgtcgcagttcaattcgagcgagaatgttccccgcagcgccgttacgttgggtatatccaatttgatgtcggctcgtcgtatcgtttgtgtcgcttggggtgaaaataaggccaacatcgtgaaacgcacgatcgaaggtgacattaccgatttgataccctcttcgttcctgcaaacccatcgtcgggcgaaaatcgtactcgatttgtcggctgccgaggctttgacgcgtatcagtcgtccgtggctggtaacgtcgtgcgaatgggacgagaagctcattcgtcgggctatcgtttggctatgcaaggtgacaggaaaacccatcttgaaattaaccgacaaagattacaacgacaatggattgagcgaattggtagcccttttcggatcggcctataatgtcaatatccgcatcttcaattcgttacaacacacgattaccggttggcccggagggaaacccaacgccgacgatacattccgtccggagcgtgccaaaccttatcccaaacgagtgatcgtattcagcccgcaccccgatgacgatgtgatttcgatgggcggcacactcaaacgattggccgaccagaagcacgatgtacacgtggcatacgaaacttcgggtaatatcgccgtgggtgacgaagatatgatgcgttacatcatgctgatcgacaacattgccaagaaattcaaattcgatactcccgagcttttgaagaaaagcaacgagatacataaattcatcggtaagaagaaagacggggaatccgatacgcccgatattcgtttcatcaagacgatgattcgtcaaggcgaggcacgtacggcatgtaactatatcggtattaaaccgcagaacgtacacttcctcaacctgccgttctatgagaccggaaccattaaaaaaggcgatctctccgaagccgatatacaaattgtaaaagatttgatcgaatcggtgaaaccccatcagattttcgttgccggcgatttggccgacccgcacggaactcacaaagtttgtctcgatgccgttctcgccgctatcgacgaaatcaaggacgaagattggatgaaagattgccgcatctggatgtaccgtggtgcatgggccgaatgggaaatcgaccatatcgaaatggccgttcctcttagccccgaggaattgcgtcagaaacgtaactctatcctcaaacaccagtcgcagatggagagtgctcctttcttgggagatgacgaacgtctgttctggcaacgtgccgaagaccgcaacaaagctacggccgatctttatgccagcttagggttggcttcgtacgaggccatagaggcttttgtggaatatcaccccattcgatagtttaacggttatcttggtatagaagaaggaggaagcggacagcttcctccttcttattttatgggcgttttggtttcgttcaattccaagtttctatccggcggacaatacgccctttacccgttgataatatcgtatcgattcctctacccctttgtcagaaggtaaagttatggcgatgccgttaaaatttttatatgaatagatgatccttgaaccatatttttttgcggcgctcagcaaatcgctttttcccatttcggcgtcatagaatacgatgaggacattaccggagatagcggtctcttgcttttccggtatgtgggcggtgcggcacgatgaaaagcagccgatggttaaaagggcgtatatgggaaataggtttaacaagatacgatgtattcgcttcatatcgctttttcgttgtggaatatagacagggctgcctaaaattcattaggcagccctgtctatatagaagtggattttattcgtaatcggcccagttggtaagagccatgtcgcccgatttcaaaaattcgttgtggaatgcgaatgcggcgttcaggcggtgaggcgtgtgtcctttacccagtttaaggtaatcccataacagttctttgtacatggggtgagcgcagttttcgataatggcgtgagcccgttgaatgggcgatttccctctcaaatcggcgacaccttgttcggtaatgagtacctgtaccgagtgttcgctgtggtcgaggtgcgataccatagggacgatggcgcttatctttccgcctttggctgtcgaagggcaagtaaatatcgacagataagcgttgcgtgtgaagtcgcccgagccgcctatgccgttcatcatcttggttcctgtgacgtgcgtggagtttacgttaccgaagatatctgcttcgagagctgtattcattgtaatcagtcccagacggcgtacgacttcggggttgttggtgatttctcccggacgaagtatgattttgtcgtggaagaatccgatattttggaatacctcgtttaacttgtcgtcgctcacggtgagggagcagctgctggcgaatttacattttccctctttcatcaaatcgataacggcatcctgtacgacttcggtgtacatttcgaaggctggaatgtcgggattcgaacctaagcaggccaaaacagcgttggcgatgtttcctacacccgactgcaaaggcaggaactggggaggaatcaagcccgattttaattgttgtgcgaggaagttgcagacattgtttcctatcttcatggtaacctcatctaccggagcgaatggtttcacgccgtctcgtttgtcgctttcgacgataccgatgatttttttcgggtctactttgacaacaggtacaccgatacggtcgctcggtttatagatgggaatttcccgacgatagggcgggtccaatggttgatatatatcgtgcatgccacgcagctctttgggatcatggtggttcaactcgataattattttttcggccagagagcagaaagtcggtgtggcgcctacaccgggtcctaataaaatttcgccgtcgggagtcacatcggtcgcttctatgacggcgacatctactttaccgagaaatccgtaacgaagggtttgcgcaaggtgagacaagtgtaaatcgaaataggcgatttcgttgttgttgatcgcttcgcgggagtctttgtgtgattgataaggcgtacggcttttgattgcttttgcccgacttaaagcaccgtcgatgtaatcactggtcgatgctcctgtataaactccgatttggaaagggcgacctgcggcatgctctgcttctgctttttttgcaagagcgacggaaactactttgggagttcctgctgcggtaaatccgctgaatccgacattgtcgttgtgatgaatgaattcagccgcttcttctgcggtgataaatttaaatgccatatctacgaaaaattttgttgtttttgagaaatttcaaggttaaggtttttatctggttcaatattttcgatttagaatttccgatgcgataacggctttacgccaatctatgtcctttacatcgatagggttctctccggcagtatcgtaatcggtgtgctgtaacgatgttataggcggcacggtatgagtaaaaaccgctacaccttctttctccggcattgtggaggggattatcggttccggcgttttttctgccggtctttcgagtatttgtgtctgtggctttttcttggcctttgggatatagtcgtcttcctgctctgcttcttctttcgctttccgcagctctttgaatatatcgtctatggttaaagtccgagtttcgccccacggttcatcggtcgtctcatgggattcggtatcttgtagaggtcgttctccctgctggtttttaacctcttgtttcttttttgatcccagggcgttaatagcgataatgaccaaactgatgattatggtgacgattatctctgaaaaatccatctcttttttgtaattttgtcctcaaatatagagttttattgagaatcttccaaattttaggactctataaataactaagagctgtttctcaacaactcttagccgatttaacctaaaccttaactatgaaaaaatttcatgtaatgtgtatgcaaagaaaaacaatatttttttaaaaacaaattttaatgataaaaatattacttttctgaatgaattttttataaattaaaattaaacgaaaggaaaaacagatagaatgaaaaatatatcgaataaagatacttttgaaaaaagagaggagaagaaactgtttatagagacttatggctgtcagatgaatgtggccgacagcgaagtggtcgcttcgattatgcagatggcaggctatacgctttgtgatacgatcgaagactccgatgccatatttgtcaatacctgttccattcgggataacgccgagcaaaaggtcctttcgagattgtcctattttcaatcgttgcgtaaacataagaaatctttggtgataggggttttaggttgtatggccgaaagggttcgcgaacagttgattaccgaaaacggcgtagatctcgtggtcggtcccgattcgtatctcgatttacctaacttggtcggagctgccgaacggggagaaaaagccgtgaatgtggagctttccacgaccgagacctatcgggaggttataccttcccgtatcggtcataaccgtatttcgggattcatttcgattatgcgagggtgcaataatttttgctcctattgtatagtcccgtacacacgcggtcgtgagcgtagccgcgagcccgagagcattctcggcgagttggccgacttgaaaatcaagggttttaaagaggtgactttgttgggacaaaacgtaaattcctatcgatatgaacgtcccgatgggactgttgtcgattttccggcactgttggcgttggtggcgcagtcggcagaaggtatgagggtgcgtttcgcgacctcccaccctaaggatatgagcgacgagactctgagaattatcgctgcttaccccaatgtgtgccgtcacatacaccttccggtgcagtcggggagcaatcgcattttgaagttgatgaaccggaaatatacgagggaatggtatctcgaccgtattgccgctattcgccgtattttacccgattgcggcattacgaccgacatgttcagcggatttcactctgaaaccgatgccgattttgaagagactctcgatttgatgcgagaggtgggattcgattcctcgtttcttttcaaatactccgaacgccccggaacgtatgcctccaaacacttgcccgacgatattcccgaggaagtgaaaattgctcgtttgcaacgtatgatcgatttgcagaacgagctttctctcgaaagcaaccgcaaggatatcggcaaagagttcgaggttttggtagaaggtttttcaaaacgttctcgcgaacagttgttcggtcgcacatcgcagaataaggttgttgttttcgataaaggtagtcatcgcataggagagtttgtccgggtaaaagtgaacgatgcatcatcagccactctgttgggcgaggcgcttgaataaaatgaaaaaagtcgatggaaaaggtcgttcgtgagaaattgtggacacatagcttctgtgcggtggctgccgggaatttcctgcttttttttgctttttatttgttgttgcctgttttgcccatgtatttgagcgaagcgttcgcagcaagccgttcgacggcaggattcatattgtcttcctataccatcacggcgctgatgatacgtccgttcgccgggtatatggtcgatacctttccccgtaaaaaactgctgcttatctgctatttcacttttctcctttttttcgggggatatctgttggccggtacgctcttgttattcgccattattcgtgccgggcacgggatagcgttcgggcttcttaccgtatccaatagcacggtggctatcgatgtcatgccgtcgtcccgtaggggcgaaggcataggatattacggagtaagcaacaatttggctatggccgtcgggcctacgttgtcgctttatattcacgattcttttgccaatttcgattatatatttttgctttcgatggtttctgccacgatcgggctgatatgcgtttcgactattcgaatgccctatcgccgcgagccgatacttgaaaagccgccggtttcgctcgaccgtttcctgcttttgaagggaatgcccgaggctttgacgcttatatttttctcgttcagttacggtgtgctttccacctatcttgctgtctatggtaaagaagagttgggtatcgattcgggagctggttttttctttgttttgttggccgtagggttgattttgtcgaggctcacttcgggccgttggcttaaccggggatatgtcacccgtaatatccttgtcggcatgttgctctctttgctgggctatctgatttttgtagccgtgcgtaatgaatgggggtactatggggcggctgttattttggggttgggctatggctgtatttgtccggcctatcagaccatgtttatcaatctggctcccaataatcaacggggaacagccaattccacctatcttaccgcttgggatttaggggttgggctgggtgttctcatcggtggacagatagccgaagtatcgaattatgcaacggtctatgcgacggcttgtgtgttgtgtgccatagggtatgtactctttaaaatgaaaacggcggcgcatttcgaaaatcataagttgagatagaatttattaaaatatgtgaataaaagaagcgaattcaacgatatagactttattttgcataaaatttgggctaaaactatccttttgctttccgatatgaaaaaaagagaggggataatgatgtcgaaatagttattaacagaggttctttccctcataaaaaggtgcatcgatttggtaaaaaagagagatatgaacaataaggcttctttcagcaaacggatttcttttctgaatgcccgaatgacttcgacattgagcgtttcattggttctttttatcttggggattatggttttgatgggatttttagcgactaatctatcccgtcatgtcaaagaaaacataggtttctccattgtcttgaacgaatcggccggcgagcgtcaggtgcatcaactgcaaagaatgctcgaacgttccaaatatgtgaaggcggcgcagtatatatcgaaggaagatgccttgaaagaggtgatgatcgagttgggagaaaatcccgaggacgtgttgggagtcaatccgcttcaatcgtctattgaggttaaattgaaagccgattatgccaataccgacagtttggccgtcattgaaaaaaatctccgggggcaagtgatcgtcagcgatattctttatcagaaagaccttatccagtcggtcaatgacaatatgagtcgtataggactggtgttattggcattggcgatagttctcatgctcatttcgtttgcgttgataagcaatacgattcgattaggagcttactccaagcgttttcttatccacacgatgaaactggtgggggctacaccggcattcattcgtcggccctttatcgtttccaatgtgattaacggtatcgttgcatcggtaatagctatgttgttgctttcgggttgcatatattatctgatgtccgagatggagaacttcacgaccctgctgtctgttcccatgatggtattggtctttttgtcggttttgattttagggattatcttaacggcggtttcggcttattgggctgttaatcgttatattcgtatggatagagatgacctgtattatatttgaaaaaacttttatgtatggaatctaagaaaatgaaatctgagtccgttgttccgggagagcaaaagaaaacggagtttgccctcggcaagactaatattatacttatagctgtggcgttcgttgtgatcgtcgtcggtttcctgcttatgctggggcccggtactacaccggaggcctataaccccgatatatttagtttccgtcgtatcgtgttggcgcccggtatagcttttgcaggtttcgttttcatggtctatgcgatcatgcgtaattcgaaataatatcgttaattttattgtatcacattatgacttggttagagtctcttatattgggcctcgtacaagggctcaccgaatatctgccggtaagtagcagcggacacctcgaaatcgcgaatgcattgttcggtatacaaggtgaagaaaacctcacttttgccgtgttggtgcatacggcgacagtatgtagtacgattgttgtgctatggaaggaagtggagattttgtttcgtggacttttccgttttacgtggaatagcgaaacgaaatatctggcaaaaatagctttgtccatgataccggtaggtatcgtagggctgttcctgaaagactatgtagaatcgttttttggcaacggtttgttattagtcggcatcatgttgctggtaactgcggcgttgttgacattcgcctattatgcccggcctcgggtgaaagaagatatatcttatcgagatgcattcatcatcggtctctcgcaggcggtagccgttttacccggactttcgcgttccggtacgactattgcgaccggactcatgctgggaaacaaaaaagaacaggtggcccgattctcgtttcttatggtgattattcctattttgggcgaggctcttcttgatttgatgaaaggagggttttctcctgcggagtcgggattgtccataccggtgatgattatcggatttcttgccgcattcgtgtcggggtgtttggcgtgtaagtggatgctccgtttagtcaataatggcaaattagtgtattttgctatctattgtgtggcgatgggagcttgtgctataatttattcgcttgttcactaatatcgccgatatggactttaacgaaggcgaaatcatatatatcgacaaaccgcttcattggacttcgttcgatgtggtcaagcgcatacggttgcgtatactccgccgtatcaaacaaaaaaaattgaaggtggggcatgcgggaactctcgatccgttggctacgggcgtgatgattatatgcacgggacgggcgacgaaacggatagaagaatttcaatatcagaccaaagagtatatagcgactttgcgtctgggagcgacgacaccgtcgttcgatttggaaacagagatagatggcgtttatccccatgaacatatcacccgtgaaagtgtagagcgaactttacctcgatttgtcggttcgattatgcagataccgccctcttattcggcttgtaaagtcgatggccgccgagcgtacgatatggcccgtaaagggcaggcggtcgatttgaagcccaaagaattggttattgacgaaatagagctgctttcttgcgaattgcccgaaatcaaaatcagggtcgtgtgcagcaagggaacttatattcgggctttggctcgtgacatcggagaggcgctcggtagtggagcccaccttgtgggattgatccgtacacgagtgggcgacgtgactcttgccgattgcctttcggtcgaacaggtcgccgacatgatagaccatatagacgtggaacccgttttggaagaagagaaaaaagaataataattaaagatatgaaactgtcccaatttaaatttaaactacccgaagagcaaatcgctcaatatccggctaaaaaccgtgatgaatcccggttgatggtaatcgaccggaagacggggaaaatagaacatcgcatttttaaggaaattatcgagtatttcgacgagaaagacgtgttcgtgtttaacgacaccaaagtttttccggctcgtctttacggcaataaggaaaaaacaggagctaagatagaggtttttctgttacgggaattgaacgaagagaatcggttgtgggacgttttggtagagccggctcgtaagattcgtatcggaaataaactctatttcggcgacgacgattctatggtggccgaagtaatcgacaatacgacttcgcgagggcgcacgttacgattcctttacgacggttcccacgatgagtttaaggaggctctttacaagctgggagaaatgccgttgccctcctatatcgcccgtccggtagaagagatggatgccgatcggtatcagaatatttttgctcgtaacgaaggagctgttgtcactccggccgccggtctgcatttcagccgtgagctgttgaaacgaatggaaattaaaggaatcgattacgggttcctcacccttcattctggcttgggtaattttcgtgaaatcgatgtcgaggatctcacgaaacacaagatggattccgagcagatgagagtgactcccgaattggtggaactcgtgaaccatgctaaggacgaaggtcgtaaagtgtgtgccgtgggtacatcggtgatgcgagggatagaaagtgcagtaagtacggggggacacatgaaaacgtatgacggttggactaataagtttattttccctccttacgattttacggtggcaaccaatttagtgacgaactttcacatgcccctttccactatgcttatgatggtagctgcgttcggtggttatgacatcgttttggaggcatacgaatcggcattgaaagaaggttatcgtttcggggcttacggtgacgccatgctcattttgtaaaatcaattgtactctttataacagggaggaatagcgttttctacgtattcctccttttgttttcgatgaacgatccttagattccgacagtatctactgaaccgccttttacggttcagccgaaaatccgtggggtagatatggattttagcgatgagtcttttgttgacaaacacaattcggacttttcggtgaaaagttgattcttgtttaaatttctatacaaagtgtactcctcctctgtgttttgcacagcaaaatataggggaggtgtccgaaggacggaggggttgaaaaaacgcagcaaggggaacggattgggctgcaatctcccctcccctgccgtgtcccgtagcattacggggtactatgttagccatataggagacaccgaagaaacgatagtttctaaggcgagggggttggaaagatggcatatagtatttttgtagtattactccctctgtcactacgtgccactttgcctatattttacatggcaaaacgcagggggagaagggcgggcttttcactttatggtttggcatttttttttgtgcaaaagggcaattcccttagatttcctactgagccgatattctcactgattatcgacctcgcttgtaatagtaagaaaaccgaaaagtaaagttgagaggctctatgaaaatactatcttttcgagtagtttcagaaaaaataaaagtgctatattgatgggcaataattccccgttttgggaaactttcttgataaaataatcctaaaagttttccaaaacaggaaacttttgtgtgtagatttgttgttttcttggaaagaatttatgtacctttacactcgcatttcggttcggttgtcgctgtgaggcacaatcgataaaaagggaatcgggtgagaatcccggacagtcccgctgctgtaattcctgcaaaagtccgttgacacaggccactgataaagaatctgtttctgaatatcgggaaggcgttttcggattgggaaaagtcagaagacctgccgaagtgggagagaagcaaatgaacgttcgaggaggcgttcgcagtatcgaatctttaataacaatcagcatggactatgcatgtattaccattacgaaacgtgatggatccaaagagaacttctcgattgagaaaatcgagcgggctatcgctaaggcttatcgtgccgacggtatgaacgacgacgagacctctattaaacaagttacggccgaggttgccgctgccatcgatagggagaatatctcggtagaagagattcaggatttggtagagcgcaaattgatgatgcgcaatccctcggtagcgaagaaatttatcatttatcgggagtggcgtaccaaagaacgtgaaaagcgcacatcgatgaagcaggtgatggacggtatcgtggcggtcgagaagaacgacgtaaacctgagcaatgctaatatgtcgtctcatacaccggcagggcaaatgatgacattcgcctcggaggtcacgaaagattatgcctataaatatttggtcggggttcgttatggacgggcacaccgggaaggcgacatacacattcacgacctcgattactatcccaccaagacgaccacttgcgtacaatatgatttggaggacatcttcaaccggggattccataccaagaacggtacggtgcgtacgccgcagtccatacagagttatgccacgttggccaccatcgtttttcagaccaaccaaaatgagcaacacggcgggcaatctattccggctttcgaccattttatggcgccgggcgtattgaagagtttccgcaagcatctcgaaaacggggtgggctttatttgtcgtttgcacggaatggaagatatgccggcgttgaaagatttgtttcaggaaggagttgtttcgatcgatatgaccgaagaacagaaagccgctttgggcgagcgtttgaaagagataggggtgaacgtttctgttgccgaactcgataccgcttggcgacaaagttacgaaatgactcgtaaagatacgcatcaagctatggaggggttggttcacaatctcaataccatgcactctcgtggaggtaatcaagtggtgttcagttcgataaattatgggacggacacttcggccgaaggccgtatggtcatgcgggagttgctttcggcgactgtcgagggactcggtagcggtgaagtcccggtattccccatacagatatttaaggtaaaagacggtgtctcttacaccgatgaggattacgatgccgcgatggccgatttcgagggagcgatggcgggaaaaatcaaattcaaggcgcctaatttcgacctgttgctcgaagcctgtcgcacgacttctacttcgctcttccccaactttctctttttagataccgaatacaacaaaaacgacctttggaaagccgatgatcccgaccgtttccgttacgaagtggcgacgatgggatgccgtacgagggtcttcgagaatttacacggcattaaaagttcgtggggacggggcaatctctcctttacttcgatgaatatgccccggttggcaatagaggcccggcgggaggctgaggagttgcatcccgacggcgacaagcatgctattcgtcgggaagcccgtattctatttttggagaaagtgcgcagtgtggcatcgatgattgccgagcaactctacgagcgttatgaataccagcgcaaagcgcttgcccgtcagttcccgtttatgatgggcaacgacgtttggaaaggtggtggtaagttacaacccaacgacgaggtgggcgatgtcatcgatagcgggacattgggtatcgggttcatcggcgggcacaatgcgatgtgtgctatttacggcgaaggccatgctcataaccaagaggcatggaacacgctctatgatgccatacgggtgatgaacaatgttgtcgaggagtacaagacccgctacaatctcaattactcggttctggctactccggccgaagggctttcgggacgtttcactcgtatggatcgcaaacgttacggtgttattccgggcgtgaccgatcgggactactacgtaaattcgttccatatcgatgtgaaagaaccggtgggtattgtagagaaaatcaagaaagaagccccttttcatgctatcacgaaaggtgggcacattacctatgtcgagctcgacggcgaagcgaaaaagaatgtctctgtcattctcaaaatcgtgaaagtgatgcacgacgaaggaatcggttacgggtcgatcaatcacccggtagatacctgtcgttcgtgcggttaccgaggtgtcatctatacgcaatgtccggtttgcaagagtgagaatatatcgcgtatgcgacggattacgggttacctcaccggaagcctcgaatcttggaattctgctaagcaggccgaagagcgtgaccgtgtgaaacacaaataatggaaccgcttcacatcatcaatgtttaccccgagactatctccgacggtttcggggtacgctatgccatctatctggccggttgtacccatcattgccggggatgccacaatcccggcagttggagtccggtggccggcgagccgctcacggagcttattctctcccgtatcgtcgccgagataaacgacaatcccattctcgatggaatcaccatttcgggcggcgaccctttctacaacccttttgcgttgttggctctgctccgtcgcctcaaagaggaaactcacaaaaacgtctggtgttacaccggctatacctacgagtccctgttaaaagacgagacccgccgtccctgtctcgactatatcgacacccttgtcgatggtccgttcgtccaatcgctctttgatccggctctctctttccggggcagcagtaatcaacggatattgcatttgtcgaaataccggtagagttttccgaggttttattgtttttgacttgtggaaatcatatttttgtatcgttgtgtgatagtaaacgataattatgaatgtcctgactaacctgaaatgcacattggctctctctgccgggttttgctcctcatttgcgaatgcacaaaaacagccccatattatattgattatgaccgaccaacagcggggcgatgctgtggggtgtatgggaaatgagtttgtcattacccctcatttggacaaacttgccaacgaaggaactttgttcatgaatgcctattcgtcttgtcccagcagcacgcccgcccgtgccggattgttgaccggaatgtcgccgtggcatcacggaatgttaggatatggacgggtagcgccgaagtatgagtacgagatgcctcaaatgttgaaagatgccggttattacacctttggtatcgggaaaatgcattggtatccccagcgggtgaaacacggatttgacggaacgttgttagatgagagcggtcgcaggcaagacccccattttaccagtgattatcgacagtggtttcaggtgcaagctcccgggaagaatcccgatgcaacaggcatttggtggaacgatcacggtgctggggtttacaaattagatgaaaaactacatcccacgtactggaccggcgaaatggcttgcaatctcatcagccattatgaccccgagagtcgtcctttgttcctcaaagtgtcttttgcccgtcctcacagtccgtatgatccgccgcaacgttttctggatatgtatgataatgtcgatgttcccgacccggcgataggggattggtgcggtagatacgcaaagcggttgaatcccgaaggggctgcctcggatgccccttatggaaatttcggtaatgaatatgtccgtaattccaagcgacactattatgccaatattacttttatcgacgaacaaatagggcgtatcgttcaagcattgaaagacaaaggtatgtatgacgatgctctcatctttttcgtatcggatcacggcgatatgatgggcgaccactatcattggagaaagacttatccctatgagggttcggttcatgttccctgtatcgcgaagtggccggcaagtgtcggtggggttgctgagaaaatagataatccggtggaattgcgcgatgttttacctaccttcttggatatagccggggcaaccgttcctgccgatatggacggatgccctcttttaccgctggccaaaggaaccgataccgggtggcgagaatatattgatttggaacatgccacttgttatagtcgtgacaactactggtgtgcgttgaccgatggaaaaataaagtatgtatggcgtttctacacgggacaggaagaattgtttgaccttgtcacagatccgcaggaactccacaatgccgttaacgataaagagtacaagggacggttggaaaagctgcgtgcccgtatgatacgtcacctcagtgaacgaggagaagaattcgtgaaagacgggcggttggtcgttcgcaaaaagaaaatgctatacagtcctcattatccgaaagaatgattttcaattccccctcggtgctttgcaatagcgaaatatagggtgagaggtttaaaacattttcaaactcctcccctgccgtgtcccgtagtattacggggtactatgttagccatatagaggagacaccgaagaaacaatagtttctaaggagaagggttgaaaaagatcatttggttgtagagttcaaccccctcgccctgcgggcactccccctatctcatctacgatgagcagagggagaggattgaaagtatcacattaacagtttttaccccttcggagatttatggggattcacctcctcccctgtgttttgcgcagcaaaatataggggaggtgtccgaaggacggaggggttgaaaacgccatctcattagtcgggttatgggatatttatcctccaccccttgccttgtgggtattctccttatatcgccatattgcgatgcagagtaaagtgtaggtattactaccggtaatccgatgctaatgaaaatgcagaatatctcgatttacatgctgccgtttcaaatagactggccttacttatttacaagaaacctgtttttcagccaattgcgaacaggcaaatcatagagtttcaaacaagcgtgtgccacgccgacagacaagataaacgtcgatacggagacaaatacgtgcgctcccatagatgcatcgggattgtgtgtcacccacgccatctgcatataggcaaagggataatgggtaatatagagcggataggagatttcgcccagataattgcatacggccacactgtgttttccctttacctcgctgccggctcccatcgccacgataacggggaacaaaaggagtatacatgccgcatcatagataccgttttgccaagcatcggtttcgcctccgatacgaggcattaccaaagctgcaacgacaagtaacgaacaccaccagaagccggcctttacccgaataagtttccctatacgaaacagcaataatcctccgaagaatggataaagcacccgaacgataccgatatagacctgttcgggggtaatactccaacctccgataacggtataagccgtaatgtctcgatgggcgagcaacccaaacacatcgagattaagtgtcaaatcgagcgtcaaaaacgccgcaaaggaaacaaaacaaaccaatgcggttttggagaacctacggacgaccaaagcataaagaatattcgccagatattcccacatgagcgaccaagtaggcccattgagcggattggtctcttgccagcctcgtatatcccaactggtaagcgccggtatcatcgtacaggcaagcagaaacatgagcagtacctgccaccatgcagtttggtctataagagggaaacgttcgcaattaccgaaatagaacaacaatgcgcctattgccgaccccatgattaccatagggtgcaaccggattaaacggcgtttgaaaaaagccagagtggacatctttccccatcgattgtcataagcatatccgatcacgaaaccagaaagtacaaagaagaaatcgacggcaagatagccgtggttcaatatttgataagcaggacctttggaataagtttcaaacaaatgaaaggcgacgacaatcacggcagccactcctcgcaatccgtcgagaatagcataacgtggtttttcggacataaccgcatcggtgattttctccatgatattatgctgttttttacgggtacaaaagtaggactcttattttgattgatatttgcatatagttcgaaacttttgatttatatttacattttatataaaacagtcccagatggaatccaaatattatcacttgacaggaggtacgcactcttttctcgtattacacgatttgctaaacccgtccgaggagtttcccattcatacacaatcggattgggagcttatctacattatcagaggttgcggcacattcgttatcggcgatcaatcgcaacctttcacgaaagatgaaatctttttaataccgcccgacatgttgcacggttggatattcgacaataatcccggcaatgtggtagaggatatttgtctgcttttcaggaaaaacctgtttaaagaactctcggttacgttacccgaaatagggccgctcggacatctcgacagccggcaacactcggcctttcagttacgaggcgatttattaaaaaatgtgaggcatgaaatgcaggaaataataaaaaccgactcgctcggacaattatcgggagtgatacggatactcggacatctggctctttccgacgagatgaatccgacaggaatcaatcgcccgttaaagaaacgagacaagaagatacaacagatagagatttatgtttccttgcattataatcacgatattcctatcgacgaaatcgcctccctcgtacacatgaaccgttcttcgttctgtgtctttttcaaacgaatgaaagggatatcgtttacgaattatctcaatacctaccgtatggatatagcttgtcgcctgttgtcgacgacggacaaatcggtctccgagatagcatacggcgtaggatttaataatctatctcatttttgccggacatttctgaaatacaaagaagtctcgcctacgaaatacaggaaccgcatggggcatggccactcggacataaccacgactccggcataatatttcaaagaaaactacgggccatcaaacaaaaggcgaccgcaattttgcggtcgccccgaattcatctttcaacaacagaatttacttttttacattcttcttttcgcagcaaggagccttagccttgtcgcatttggcttgtttgcagcaatcagctttgtcgttgcattttgccttagagtcgcaacaaggagccgtcgctttacaatctttgcatttgcaatcggtgcaattacactctttcttacaatcggctttgccttttttgcagcattccgtttgggtcttactaccggtagtcgtttgagccacagccggcaaggctatcatcgaagcagcggcgatacacgccataacaagaaacttcttcataattactttatttttaataggtgactactttacaaaatagaaagccagtaaggttgccttagtatctcggcatagtctatttcgtattattttacaacgcaaatatacaatgaggagattaccgaaaaacccaatgaatcttatttttaccaaaaatcctgtgaataaaatctataaatagaataaaaatcatatcgattactatcgtcctgcctatccgtgtgccacggaagtcgtgagtaaaagacaaatcgcatttctgaatcgacgaaaaaccgttgtctatattactattgccaatacattcgactttaatttgcctcggctatttccgattttcggtaaaaaagagtatcttcgtcattcaattatatacagacaaaccgcataagaaaagatggacgaatggttgtcacgtacccggctgctgtttggcgatgaaccgataaagcgattgcaaaatgcccacgtccttgtcgtgggggtgggtggtgtaggggcttatgccgccgaaatggtcgtgcgagccggtataggagctttgacgattatcgacggagacaccgtgtccgagagcaacctaaaccgacaattagtcgctttgcacagtacattaggaaaacccaaagtcgaagtattgaaagaaaggtttctcgatataaaccctgatttgaagctgacggcacaacaccgttttatcgaagaggaagatattcccgctttgttggagggcggcgaaatagattttgtcatcgatgccatcgacacgctggcgccgaaggtagctttgatcgcctattgcctgcggcataaaatcaaaatcgtttcatcgatgggtgcaggcggacgcaaagacccgtcggccatacggatagccgacatagccgatacctaccattgcgctttggcaaaagcggtgagattgcgattgcggaaagagggtatctccaaaggtctgaaaacggtattctccaccgagcaggccgatcgtaacgccatcgtggtcgtggaaggagaacgtaataaaaaatcgaccgtcgggacgatttcttatctgccggcaatcttcgggtgttatctggcggggcatgtcatcagaaaactaacagaagtatgatagagataaaaaacatacacaagagctatggttctttggaggtactgaaaggtatcgatgccgtgatcgaacagggcgaaatcgtctccatcgtgggggcgagcggagccggcaaaacaaccttgttgcagatcgtgggaacgctcgacaagcccgattgcggggaaatcttatacgacggcaggcgggtggataacctccccgatagggaaatggcgcgtttcagaaacggtaacatcggattcgtattccagttccaccagttgctgcctgaatttacggctctcgaaaatgtgatgattccggctctcatcggggggaaaaaacaatcggatgcagaacaggaagccaagcggatactcgatttcctgagcctgagcgaccgactgggacacaaaccggctcaactgtcgggcggtgaaaaacagcgagtagccgttgcccgagcattgataaaccgcccctctgtcatactagccgatgagccgtcgggaagtctcgattcgaaaaataaaatcgaattgcacaaactgtttttcgacctgcgtgacgagttcaaacagacgttcgtcatcgtcacgcacgacgagacgttggctcgaatgaccgatcgtaccctcttcatgaaagacggctccatcgtttctcccgcttctgtcgaagaataaaacaaggcatacaaatgaaaaagagttggttatatggttgctcctttatccttttatctatcttcgcaacggcttgcggagacgatgaaaaagatatttacggcatcttctatgccgacatcgtcacttgccatacgaataaaggcaatccttatttcacctaccagacaaccgattccgctccggtcgatacgctttatcccgtttcggaagtaaatagcgatgacatgggcgagggagtgcgcgtattgctgcaataccgcccgatagaaacgttgtcggaacacaaaaagcaggtagaaatacaagcgctttcggctattcatttcgacacgctccgaatagtaccccatgacaaaatcgaccagttgcccgacgacactctctatttgcaaagcgcatggaaaaccggcgacttccttaatctgaggtatcgtatcgattaccacagccggccgcacagcatcctgcttgtcgccgacgaagccgaactttccggcgataccttgaaagtacagttgcgacacagtcgcaacgacgacccagagggacattggagcaatctatactcgtcgttcaatatctcggcttatcgaagccgtccttatacgacgctgcaactttatgtaaatcaagtaaatttcaactataaatactattactttaaactgaactgattatggaagaaaaaaaggaaatccagatagaattgtctgccgaagtagccgaaggcatttactccaatctcgctattatttcacatgctccgtcggagttcgttatcgactttatccgcatgactccgggtgctcccaaagctccggtgaaatcgcgtatcattctcacggccgagcatgccaaacgattgttattcgccttgcaggacaacatacgcaaatacgaagctcaattcgggcctatacaaatgaacgatcctcaacggggcggtatgcctcctttcatggctcccggcggggaagcctgacaaccgacaggagacgaattctctcgaactcgttatcttttcgggtgtgactcggaataactaatctcgtaaaaaaggaaagacaatgaacatcactttgcaacaatggctttctcgacagccttatacacaaacgaccgacagcgatcgttactatacgcaactggccaaccgagtatatgacctcgtaaacatatctccgttgaaagaaagattaaccgaggaggccaccaaaagtctttgttgcgatgtcgtaggttattttgccgatattctgtccggtacgggactgtgggcaacgtttctctcccaccaccgttcgctctacggtcgtaccctgccattctttcccgccgagaattactacgacggggaagtaaatcgggaagacctgcgagtgctactttggtatctgctttgtacgcacgactccttgcacgagattctttccccgctcgacgatcgtctcgtcgcaacggccgatacgatttacgatctgttagagtcggaatacgaaacagctcccgactcacccttgttacaagaattttgtcttcccgaactgaacgataccgatgaccccgaatcccgttaccggttcgccgaatggctcttttgggattcgtttctgttgggcccttccaatcgttcgctcgcccggcagctttcacacgaagcacagagtaaatcgcatggagacaaagaaagaatcgccaagctcggcgagctgcgtcgggaatcgctatatactctgccggccggacctttggcgctctttgctcacgaatgggtctctttgctttggcaacacaccttccccgaagaagcggaagagaaaaaggaactgcacccctattaccggcaattcacccgagaaaccggaggcatgcctgtcaaatacatagactcttactcggagttggacaaatttcttaccgaagggatgcaatggggagagacagaaggcggacacctctcgcacctcgccgggaaaaagaactttattctctatgtcacgccttacaaaggcatgctcatcgcttcggatatagcccaatgcgtatgcgaccctgccaatccttgttacgacccgcaggtagcccggagggatgcactgtcgctccttaccgtacccgggcgatgccccatagacctactcatctatttgtgcgaaaaccgactacttcccgatgcccgctttgccgacggagactccgcacttgtaaccgaaaactgggacttcatcgctcgctgtcttttgcaggattattaccgggcggtgtaaataccgctgagtttttttaatcccttctccccagccgtgtcccgtagtattatgcgatagaggagaagggtacaaagctatctttgtgccgaaacgagaaataccattttcaatcctctccctctgctcatcgtagatgagatagggggagtgcccgtagggcgagggggtgaatatccgatataaaccgactgatgagatagcgcttttcaacccctccgtcactacgtgccacctcccctatatggctaacgccacaccccgcaatgctacggggcacggcaaggggaggagtttaaaggtgaactgccccaaaaagctggacaagctccacctaaccgaaagtgtttcatcttatagttagtatcggattactttgcccgttacccgccgttttccttttggcttcaccgcccgataaaggcggaaagaaatacatggaaaagttgagatgtattctttcttttcccctcggtagcgaaaacaaaatggtgtgcctgatttggagaattcggagaagagtattacctttgcattcgaatttttattcagttattcgtatgattcaacagggcaagcatatttgtttcggtgtaaggcgcaggggagtacgtgcgctttcgatcgtgcatgtccattggttcagtggctttatttgactgccaatcgatttttagggggataatttataaaatctcgttttcttttccccttttgcgggcgaaagccctatccggttattttcattcgtataaacgtagctcggatacgacgatggagtcgttgtagtctgtggcataaaagacagtcaaattatgtttcgtattttgatccttttggttttgggtgttggcgtaggatatatgttgcgcggacgttctttcgtcggcgtgacgaaatggagcatacagattaccgtttgtgtcctgttatttgtgttcggggtgtcgatagggtccgatcgtaatctcgtagataatttttacaatttcggttggcaagcggctgtaattgcttgcctcggtgtgcttgggagtattgtggccgctcgtgtagctcaacgtttgttttttaagaaaggaggtgaatcatgaaagggaatttgatgattttggtttgtttccttgctggggtatttgtagggttgggcgatttcgctccggagtggttgctcggtcatgatttgcctataattattctttcgctgttgattgtacaagtgggaattagtttaggttcgaacaacgatttacgcggattattccattcgcttaatccccgcatgtctcttttgcctgtttttactatcggtggcacacttttattttcggccataggtgtttttttgctgcatgggcgtgatttgaacgattgtttgacgatcggcagcggtttcgggtattactcgttatcgtcggtgttgatagccgatattaaaagtgccactctcggtccgcaaggagctgccgagttggcgactatcgctttgctcgccaatgtcatacgcgagatgatcgctttgttcggtacacccgttctcgctcgttggggtgggaggttggttcctatttcggtagcgggtatcaattcgatggacgtgtgccttcccatgatcgtgcgaagttcgtataagggagaagaacttataccgatagctattttacatggcatagcactcgaagtaagcgtgccgtttcttattaatgcattctgttgagcggtctgtttaaagttcggttatgccataaaaaagaacgtatctcgatcatacatttgtcgaaaaatacgagacgatggtagaagaaccttttgtaaacttgcgcacggcgatagaatcgacccgccaagccgtactgctcaaatactataacgagctgttggagctcgatcccaagactcaaccgaaacagatcacggcggtaacccgctgtgtcgatacgctcgaacggcacagtcgggaacaggaagagcaacaaaccgacaacgacatcgacaaaatgatagccgagggacgtttgccgggggaatatgtgcagcgttaccgatggtgtaaacgcgcggcatactatttttcgtctattgtcagtgccattgacgagaccgatgcatatgatttgcccgagggtgaaaagcatccttatgaagaatttgccagtcgtttttgggaagaggtcgctcgtcgttattgggctgccaaagatgaggtgaaaaaggatatggaggaaaaacgcaaacaatggaagcaggggcgattggcgaaatgcagccgtcgcaagaagaccggcaaatcgctccggttgcccaaagttcttcctgcgccgcctacacctccgcctccttctcccaaaggatatttcccgcatctgcccgtttcgccgcagcccgcaacggcatggtgcatgggataggaaagaggttcttctaaaccctttaaaaatttctaagcgattcttcttaacccctctcctcagaaactgtcgtttcttctgtgtctcccccctatactctactaacgtaacaggggagaaggagaaatacccgcaaagcaaagaaaaattaaaacagcagcagaacgatgttgtcgaaagatttccaccctcctcccctgctgtgccctgtaatgctgcgggacatggcaggggagaaagggatatgtccggtataaacagactgatatgatgttgttttcaacccctccgtccttacggacacctcccctatcgcacattcgtgcgcagaggaggagtacaacacatttcttagcttttatagttttctacgcaacaagacaaaacattctaaccttctcccttgccgtgtcccgcagcattgcggggtgtttttgcggcgcaaaatataggggagagacagaggagcgatagcgacgaagagaggggttggaaaatagcatgttatattttgaaggcttaaccccctcgccctgcgggcactccccctatctcatctacgatgagcagagggagagtgttgaaagtatcctcttgaacagcttttatccgctccgatgctttgtgggtatttttccctcctccctgccgtatcccgtagccttacggggtgttttgcccagcaaaatatagggtaggtggcacgaagtgacggaggggttgaatatcatcaaaatctattcggctgcttttcttaaccacttgccgaggagatcggaatgtggttgccgacaaaagatttattgttaatattcaagtctgccctcatgaattttctactgaatccatttgttctttttgctctgcattcgacttgtactatctttgacaaaagtccgatataggctgcgattcggcaaaaaaacaaatggatttgttctttttgctctcatcttgcactatctttgtacccattaaacgagtatagtacatgaaaatagaacagattatatccgatgctgcggtcaaagcggtgaaagctttgtatggaatcgaggcagctcccggaacgacagttcctcaaaagacgaagaaagagttcgaaggaaatctcacgttggtggtgttcccttttttgaaagcctctcataaggctcccgaagctacggctcaggagataggcgagtatcttctcgccaatgagccggcagtcgcttcgttcaatgtaatcaagggctttctcaatctggtgatcgctccttcgttttggagccagatgttgcatcacatcgacgaagaggccgatttcgggacgcataaagctgccgcagatgctcctttggtcatggtcgaatattcctcgcccaataccaacaaaccgttacatttgggacatgtgcgcaacaacttgttgggatatagtctttccgagattttgaaagccaatggcaatcgggtggtgaaaaccaatatcgtcaatgaccggggtattcatatctgtaaatcgatgctggcttggcaaaaatggggcgacggtgtcactcccgaaaaggccggaaaaaaaggagaccaccttatcggtgatttctatgtgttgttcgacaaacattataaacaagaactgaaagaactggaagccaaaggcatgacccccgaagaggccgaggccgcctcgccgctcatgcaggaagcccgcgccatgttgcgcaaatgggaggccggcgatcccgaggttcgttcggtttgggagatgatgaacaactgggtctatgccggattcgacgagacgtatcgtcgcttgggcgtggacttcgataagatatattacgagtcgcagacctatctcgaagggaaagagaaagtgctcgaaggattggaaaagggtatcatgtatcggaaagaggacggctcggtatgggccgacttgacggcagaggggctcgaccacaaattgctgttgcgcagcgacggaacatcggtgtacatgacgcaggacatcggtacggccaagttgcgtttcaaagatttccccatcgataagatgatttatgtggtgggcaacgaacaaaattaccattttcaggttctttctatattgctcgacaaactcgggttcaaatggggcaaagatcttgtgcatttctcctacggtatggtggagttgcccgaaggaaaaatgaaatcgcgcgaaggtacggtagtggatgccgacgacttgatggacgagatgatcgccaccgctcgcgagacatcggccgaattgggcaaactcgacggctgtaccgccgaggaagcggaagaaatttctcgtatcgtgggtttaggcgcattgaaatactttatcttgaaagtcgatccccgcaagaacatgactttcaatcccaaagagtcgatcgacttcaacgggaacacggggcctttcattcagtacacccacgcccgcatctgctcggtcatgcgcaaggctgccgaagccggtatcgattatcgccaagtggacaccgctaaggtagaaccctctgaaaaagagatttcgctcattcagcatttggccgatttccctgctgtggtcgccgaagccggtcgtatatacagcccttcgcttatcgccaactatgtgtatgatttggtgaaggaatacaatcagttctaccacgattattcgattctgcgcgaagaaaacgccgaagtacgggcattccgcctaatgctttcggccaacgtcgccaaagtgataaaaaccggtatgggattgctcggtatcgaagtgcccgaccgtatgtaaaaaataactgttaaaatagaaagaaatggaaaatttgtatgattcttcttataaatcgactaccgggacatcggttttgtcgatggtgatgcgtaaggtgtacggacgtatgttcctcgcccttgtcgtgacggctcttacatcgttgtatgtggcttcttctccggctatattgtcggtcgttttgggaaaccgggctgtctttttcggcttgatgattgccgagcttgccgttgttttcgttgtctcgggcatgttgaataaactgagcacgacgaccgccacgctgttgttctatttgtatgctgttcttaacggagtggtattttcgtccattttcgtcgtgtacgatttgggctctatcgcctatacgttctttattaccgccggcgtgttcggggcgatgagcgtgtatggcatggttaccaagaacgatatgaccaagttcgggagctattgtatcatgggattgttcgggttgatcatcgcatctgttgtcaatatattcgtggcaagcagtactctcgactggattatcagtttgttcggcgtggctttgtttatcggattgacggcatgggacacccaaaagatcaagaatgcggcctatgtgaccgatccttcccagaccgggaagttggcgacgataggcgctctgtcgctttatctcgactttatcaacttgttcctttatctgcttcgtattttcggaggtcgtagcaacgattaagcgttacgggaactgaatccataatatactcgatatgacacaaccgttttatatctataatacacttacccgaaaaaaagaggagttcaaaccgttgaaccctccctacgtgggtatgtatgtatgcggtcccacggtttacggggatgctcatttgggacatgcccgtcccgctatcacgttcgacgtattgttccgttatttacggcatttgggatataaagtgcgctatgtgcgcaatattaccgatgtagggcatttggaaaacgatgccgacgaaggggaggataaggtcgccaaaaaagcacggctcgaatcgctcgaaccgatggaggtggtacaatattatctgaatcgttatcacaaggcgatggaagctcttaacgtgttgccgccgagtatcgagccgcatgcgtcggggcatattatcgaacagatcgaatatatcaaaaagattatagaggccggatatgcttatgtaagtaacgggtcggtttacttcgatgtagtgaagtataataaagaccaccattacggcaagttgtcggggcgcaatatcgacgacctgctcaacacgacgcgggagctcgacggacagagcgagaagcacaatagtttcgatttcgctctttggaaaaaggcttctcctgaacatatcatgcggtggccctcgccgtggagcgacggttttcccggctggcatctcgaatgttcgactatgagcaccaagtacttgggcgaggaattcgacattcacggcggaggcatggatttgcttttcccccaccacgaatgcgagatagcccaatcggtggctgcgcaggggcacgagacggtgcactattggatgcataacaatatgattaccatcaacgggcagaagatgggcaaatcgttgggtaacttcattacgctcgacgagttcttctccggtaatcacaaattgttgcaacagccttattcgcccatgacgatacgcttctttatcttgcaagcgcattatcgcagcacggtcgatttcagcaacgaggccttgcaggcatcggaaaaggccctgcaacgtatgctcgaagggtgggacaacctctcgaagatcgagcctgccgaagtttccacggtcgatgtgaaaaccattcgcgaacgttgttacgaggcgatgaacgatgatttgagtacgcctatcgttatctcccatttgttcgaagccgtgaagattatcaacacggtattggcgggaggagctactttgtcggttgaggattcggctcatttgaaggaaactttccgtatattccttttcgatatcatgggcattcgcgaagaggccggtgtttcggaagaggggaacgaggcctatcataaagccgtggatttattgctcgatgtgcgtaaggaggctaaggctcgtaaggattggacgacctcggattacattcgcgacaggttgtccgagataggttttgaaatcaaagacaccaaagagggggtagagtggaagttgaaataaacagactttcaatgaaatgatacgacaatccccgtgttctctcagaacacggggattgtcgtatgtagaacgttcggagcctcttttatttcttcatttctgcgacgaactcgttggcttttgccacggctttggtaatgtggtcgcagatatggtcgtcgcctataagccggtctatattcgcctttttgagggtggcatgtaccgtgggattgacccccgacagaatgacatgtatcttctctttctgcgacgaggtaatcaggatttcgaggttatggatagccgtagaatcgataaaaggtactttccgcatacggataatgcgcaccagcggacgatcggccatactacgcatcagttcgtcgaacttggtggctaccccgaagaagaacgggccttctatctcgtaaacttccacgcctttggctactttcaagacttcgtgggtagtcgattcggttccggtcgcaatatcgagctcgtcgtggagtaccgatatttgcgtggtctctgtcatgcggcgcaagaagaggacaacggccaacaatagcccgatttcgatggcgatcgtaagattgaatataacggtaagcaggaaggtgatgatgagtaccgacacgtccgattttggatttttcagcaaggaacgtaccgtgcgccaaccgctcatgttataggaaacgacgatcaatacaccggcgaggcacgacatgggcacgagcttgataagcggcataaggaacaggaatatcaacaaaaggacgatagcgtgtattataccggcaatgggggtacgcccgccgttgttgatattggtcatggtacgggcaatggctccggtgacagggattcccccgaagaaaggaaccacgatattggctgctccctgtgcgataagctcggtattggagttggttttgtcgccggttacaccgtcggcgacggtggccgatagcagggactctatggctcccaatacggcgatggtaaatgccggagagagtaattggtttatcgtctccatattgatattcagagcttgcggctcgggaacttcattgctgatgttaaaacggtctccgatggtttctattccttcgattccccaaagacgttcgagcacatagacgagcacggtcatgagaataatcgccatgagggagcccggtattttgttggagatacggggagtgtaggcaatgatgagaatactgagtattcctatacccagcgaccagaaattggtggtctcgatgtgctggaagtaagcgacccacttggatatgaaatcggcggggacgctgtccatcgataatccgagcaggtcttttatctgtgtggcgaaaatggtaagcgcgataccgctggtaaatcccacgacaatggggtagggaatgaacttaatgatggttcccaagcggaagcagcccatcaagaccaatatcaaaccggccatgaaagtggctatcgccagtccttccaatccgtaggcttgtataatgccgtacacgataacgataaatgctccggtaggcccgcctatttgcacgctgttcccgcctaagaaagagacgatgaatccgccgataatggcggtgatgagacctttttcgggagatacgcccgaggcgataccgaaagcgatagccaaaggcagagcgacgataccgacgatgataccggccatgaggtctttcgtaaatttttctttggaatagcttgccagcgaagcgagaaacttcgggtgaaaatctaatgtacttttcatcattttacctattttatacctattattcgaagagcccgatttcgacatcggggttcaacaaattaataacctctctaatcggtcgggtgaccgatttgaaaaaacgcagcaaaattaactattttttatggttaaagccagtatttgccgaaaaaataaaaaaaataataaagagaaaataccacccggatattgggtaatggtattttctctttatcgaatagtgcggtggtacgcttagtagataaccaacaatcctatttttcccgtatcgttcgaatggattacataagtaccggctgtcagggcgtcggtagaaatcgtttcgttttcatttcggagggtttgcctgtcgagcaacataccgttcaccgaatagatttcgaatattcccgaacaaccggcgtttacacgttctccctgttttacaggattgggcgagaacaacatacaacgtcctttgagggaagcaattcccgatgtcgtgttttctactaatgcgagtgtgtttgtgctttgtgccagattgatcagcggactttcgttgcttaaaggagcatagatttccaagctcgaccgtaacattttgccttcggccacggcggcgatttctttatcgttcatacccgaacgccagaagaacagttggcgatagtctgccttatcgggcgcattactcccgcctaaggcaaatttcgttgctacgagcttttcggaaagctctccgcattttacgccgttcacatacagttgggtcattccccacgcataatagtgcgtcaaggatatacataaccattcgtcattcgccgaggtggtcgatgtgatttgtccgtccgatggcgattcgtaaacgatatttccgttttcgtcgattttaatattacccgtgccgttttcggtctcgaacgaggcgagagttccggcagaagaggctttcacttcaaatgaaagggtgaaggggtgaacgatattttccggtacaaattcgatgtgttgtgtagcggacgctttgcccaaagcataggcggtgctttcttgtcgttgcggaatggttttcccggcatccagagcatcgaagagtgacggtactatggcgtaggacatttcccgatgtccgtccgaattggggtgtgctccatcgctttcaatcgctttgacccagcgtcctgctccgtcgtcgacagctcccagcatatttaccgaaggtacttcccattgctgtatggtcaggtttaggtttttcaaaatctcataatcggattcgttgaatcctccgttggcatagttacttgccatgaccggcacgatacctacggagtcggcttggcgaatcaattgtttcatgcctttctcgtaatttttcgcggcttggtcggtttgagtgccgttgttccgttcattgccgagcgacaacccgtagaacacgtagcgtccgcaatcccgtaataggtctcgttcccaacggtcgagtaccatttgggtcgtattcccgccgatggagatgttcgaggtggtccagtctttgccgatgttttcttgtttacgttgtttcagcaggtcggtatatatgtaggcgtatccgtaatcgtttgtcgctcctgttccatagcagacagaggatcccatgaatgatattttgtattcgtcgatttccttacacgattcgggatagggtttttcgatgtcgggtttttccatagtctggtcggtttcatgtatttctatcttatcgatgttgggcccgtcgtaccggcatgattcggtgaacgaaatcgtgttcagccctttgtccaaccaaaccaataccgatgtttctgccgtgggcagttgatcccatttgccttcggacttgtttacattgatataggtttttgcatagttgttgatttggatatccaaaggacgtcctgtggggtcgtttgtaaagattttcaattcatacggcccttcctcgggtatatcgacgcacgtgaattgcaggtaggaattactcttgttgttgaagtctcccacgtagcgaccattggacataccttccagattttttactttcaaggctccatataaatgggcgtattcggcttccaatgttataggaaaaccttcttggggtacaggcaggggagattccgaggtttccagtatttcgaatttatccaaattcggacctcctgatgtcgtgggatagggcgttatttttatggtattcgtcccggcagccaagtaaatcagcaccttggccgtttcggcggggggagtatcccatttcgccgttccgttaacggtacattctacctctggataattgtttacttttacagtgaatcgacgtacaccgttgcagttgaaataagttttgaattcataggttccggctttttccatcgtcacattgtggaagaaaaggtaactaccccggtcgtttcctcccacgtatttcccgttggagaaaccatcgcccgatttaactctcgccggtgaatgaatggagtcggcgttttcggcttctaaaaccaaaataggactttgagcacatagcccgaataccgataataaaaagaatagtgagaatttgatttttttcatggagttaaaatagtttctcatgtcgataatatttttaaggattcacatattatgacaccaaaaacgtcgtgtacccttataccgaatcgggaattttttgttgttgtccgtcgagactcgatgatggcgaaagtgtatttttctttccgggtttcgattcctcctttgtctctttctctgtttttatggttgtcgcggtttgatcgtcacttgtttaccggaaaagttgcgggtaattataaatggaacaccccctttgtggttcatttattgaacacaaagggggtgggtatgggtgattcgctcactggcgtgttatatcttttttgtataggctcggcggcgtttgtgttgttgccgttcgaaatattgccattgggattgtactttctcgttcatttcgagttcgggattgctctcggcatatttgtaaccgttttgaatgaataccgggataaggtcggagaatagcaacgcattgactcctttgctttggtagtcgggacggacagctaccaacaagaggtcaaccccgtcgtttttgcctttgagggctttgagcagatggataaaaccgaaaggaaacagccggcctctcgatttctgtaaggctttcgacaaagaaggaatggcaatacccacggcaatcaaatcgtcttgctcgtcgacaatggctgttacgttttcgagccgtaataacggaatgtacatttttacataatagtcgatttgtcgttgagacagtgtcgaatatccatataaatcggcataggcgttgttgattaggtcgaaaattttttgaccgtaattgcctttgtatacgtcggatgcgcttttgaatttcagaattcgcagattgtactttcgttgtacgatgtcgctaatgcgttgatgtttttcgggtacgcattcgggtacttttattttgtattccacccaatctatcgctttttcgtagcccatgctttcgatgtgttgcgggtagtatggatagttgtagatggcagacatcgtgcttagttggtcgaacccttcgacgagtgttccttcgggatccatgtcggtaaaaccgagcggcccgtgtatttcggtcatgccttttgattttgcccacttttcgacggcattgaaaagcgctttgctgacttctttgtcgtcgatgaaatcgacaaatccgaagcgtccggctttttccccggacttttcattcgctttgtggttgatgattccggcaattcggccgacgggttccccgtctttataggccatgtagtaaaccgattcgcagaagtcgaacgccggattgtttttcgaattcaaggttcctacttcgtccagaaccagagccggtacatagtattcgtttcctttgtataaatttatcgggaactttgcgaactttttcaaaccgcgagttcctgatatttcctgaatagtgattgacatgatgtttataatttcagcaatttgttctcggttgttattcctttattccgtatgccaaatctccggcatcgccaagtcccggaacgatgtaggagtgttcgtctaatttatcgtcgatcgctcctacccatattgtcgtgttttcggggaagtggtctttcacgtaatcgatcgcttgccggcttgcgattaccgatgcgatgtgtatgtctttgggtgtgcctttggtgagcagggctttgtaggatagctccatagatccgcctgtcgccagcatgggatctgtgagtaccaatactttaccatcgattcgcggtgaagcgatatactcgataaagatgtcgaaattcagcttgtctttatatttccggtaagccgagacaaatgcattttcggcatcgtcgaggcaactgaggaatccctgatgaaaaggcagacctgcccgaagaatagtggccagtacaactgtatcgtcgggaagattgacatgggccgttcccagcggtgtttttacttttttctcggagtaatggagccggtgacttatttcgtaagccattatttcgcctattctttcgaggtttcgccggaatctgattcggtcggtttgaatatttacatctcttaattcggccataaatcggtttattaccgagtttttttccgcaaaattgattacttccatattttgtgttttttgccgaagagcaaaagtacgtataaattttgttttggaaaattatagattgttttttcttttgttttgttctttaaaaagggaagaaacagacctttttgctatcttggcatagcgattgagggtgtgtttgtaataaatacaaacaattagcgaaaattttctttaattaaatcgttacttgtagaatttgtttttaattttgcagtcggttttcatggattaagaaaaaagagaaatattttataaaccattaaatttcaaaaacaatggcaacattagatttaagcaagtatggtattaaggatgtaaaagagattttacacaatccttcttacgaagttctgtttgaggaagaaaccaaagcaggattggaaggttatgaaagaggtcaggtgactgaactcggtgctgtgaatgtaatgacaggtatttataccggtcgttctcctaaggataaattctttgtgatgaatgaagccagcaaagatactatctggtggactaccgatgaatataagaacgacaacaagccttgctcggaagcagcttgggccgatttgaaagccaaagccgttaaagaactttcgggaaagagattgttcgtaatggatactttctgcggcgctaaccccgctactcgtttgaaagttcgtttcatcatggaggttgcatggcaagctcacttcgtgaagaacatgtttatccgtcctaccgatgaagagttggctaactacggcgaacccgatttcgtatcgttcaacgcagccaaagcgaaagtagacaactacaaagagctgggtctgaactctgaaactgctaccgttttcaacttgaagactaacgaacaagttatcttgaatacttggtacggcggtgagatgaagaaaggtatcttctcaatcatgaactatctgaatcctttgaaaggtatggcttcgatgcactgctcggccaacaccgataaagaaggtaagagcacagctatcttcttcggtctttccggaacggggaaaactactttgtctaccgacccgaaacgtttgcttatcggtgacgacgaacacggttgggacaacgacggtgtgttcaactacgaaggcggttgctatgccaaagttatcaacttggataaagaaagcgaacccgatatttacaatgccattacgcgtgacgctcttctcgaaaacgttacggttgatgccaacggaaagatcgatttcgcagataagagcgtaacggaaaatactcgtgtatcttatcctatttatcatatcaagaatatcgtagaaccggtatcgaaaggtcctcacgctaaacaagtaatcttcttgtcggccgatgcattcggtgttcttcctccggtttctatcttgaacgcagaacaaaccaaatactatttcttgtctggtttcaccgctaaattggccggaacagaacgcggtattaccgaaccgactcctactttctcggcttgcttcggagctgcattcttgtcattgcatccgaccaaatatgccgaagagctggttaagaaaatggaaatggtaggcgctaaggcttatttggtgaacaccggttggaacggtacgggcaaacgtatctctatccgcgatactcgtggtattatcgatgctattctcgatggctctatcgacaaagctccgacaaaggttattccttatttcgacttcgttgttcctactgagttgccgggtgtggacaaaaatatcctcgatcctcgtgatacttatgctaatgctgccgattgggaagttaaagctaaggatttggccgctcgtttcatcaagaacttctctaaattcgaaggtaatgccgccggtaaggctttggttgctgccggtccgaaattgtaatcgtacacgatttgactctatacgcaacaggccgcttcgtcgaagcggcctgttgttttttttgtgatggtccggtggattttcaataacgatgaaagtattgtcttctgctgtgtctcgtggtgttacaaggtgggtataatagtgtataaaactttttttggaaaatcgacggggctgtttcgatgaatcccttacttctctatattttccatgtggaaaacagaccatagtgctatgggatatggcaagggaaaggttgagatgcttatacttattttgttgagggctattttgttagtcggttggtagtttccaacttctcccctgcttcgattttcaatcggagataggggacgccgcaggagtgaatcctacggagaggggttaaatctaagaagctgttttaaatttatagagaaataatattatcattgcaagcaggtatgttccggccatattgagcccctgtctcgcatcttgaaccccttgatttttgtcaataagcccgctattgactgcctatctcggactccaatcagcttcaacataggtctcaatctgtcttggaataaatttaaaacagcttcttagattttgagattttttttacagggaatttaaccccctcgccctgcgggcactccccctatatcgctgcgcgacacagagggagaggttgctgctccctgttatttttgttgttgccggtattttctaacccctccgtcctacggacacctttcctatatggctgacgccacaccccgcaatgctacgggacacggcaagggaggaggttaagagtgtacaggggagagaaaagggaaagaatacacacaaagcaccgaaggagtaaaaacagaggaggttaaatatagctcgacttttccatgtacttctttccgcttttatcgggcggtgaagatgccggtttacaacttcactttctttatcttacccttactttcgttgtgcatacggtctaccgcggtcaccacatatacatattggcgggttccgtgtttataagggagcaaaaatttcgtgtcccgagtaatggctacgagatgggatgcatcacataaacaaatgtcttcgctgggtgcaaaacgatagacacagaaataaatttgcttctgcatctcatcgtcggttttctttcttttccactgcaattcgtatccctcgggagtccattttgccttcaaacccttcacctcgtcgggagccttgctgtcgataaacgtataggccgggataagggagggaaccgcatggtaatatcccttcaagtcatcggctatgcctttataattttccaacaaggaatagcccggccagaaacagttcccgcctacatggtcgagataacgactcaactgcattttatggttcagttgcgtgtatatgggattcacgtcggtagcattcatcgtacgtgccacgtcctgaccgatgtagagatgacgtccgttggcatgattgttccaccaataaatcagtgtctcgacgcatgcggcctgatgacctatctcccaataaagttgcggtaacatgtaatcgacccaaccgttgcgagtccacaataacacatcggcatagagctggtcgtagttttgcaacccgttcgtcgcactgccgtccgggtcgctcttttgattccggtaaataccgaacgggctgataccgaatcgcacccacggtttacgcgatttgataatctcgtgcagttccttaatcaatgcattgacattctcccgacgccaatcgccacgatccataccgttaccgtaccgggcataactgttttcatcggggaactcgctgcctgctatcggataaggataaaaatagtcgtccatgtgaatggcatctacatcgtatcgcgacacaatatcgtcgactacccgaccgatgaaccggcggcactccggtaaccccggatcgaaatagagctgccggccataccgaacgaaccattcggggtgtttatgatagatgtgcgatgcggcgagcggctcatcggcattagttcccacccgataagggttgagccacgcatgcaactccatgttgcgggcatgacattgctcgatcatatattgcaacgggtcccacaacggttcgggagccacgccttgcttcccggtcagatacttgctccacggttcaagctccgaacgataaaaggcatcggccgtcgggcgcacttgaaaaataaccgcattgataccgatatactgcaaactatccaacatttggtcgaaatagtcttgcatcgcatcccgattcatctccatgtagcgactctgacctaccgtgtgaatccatgcgccgcgaaattctcgtttcgggtgttctgcaccctgcgacaccattccgcttaaaaaggaaaacaataatagtgataaataaattttaagtttcattgtattgatttttgttttatgagacaaaaatagtgcaaggcagggagataaccaaatttatttgtttctgtgttcgttcatattatctttgtcactacgaatataggaagcaaatcgaaaatgcaatttccgtttgtctctgcacttacctttcactatctttgcaatatgcgagaataagtcgagtcgggtatgaaaaaatgaggttggttttatccgactcgttttttactctgcatgcacaacgtgcaaaatatagatacgatatggatattatatggattattgtaggagcgatatgtttgctcgtcgggttagcgggttgctttcttccggcacttccgggtcctccgctctcttatgtgggcatgatacttcttcatctcaccgacaaggtgcagtttactgcgacacagctcatcgtctgggccatattggtcattattgtacaagtactcgattacctcacacctctcatcggcacgaaatacagcggaggtagcaaatgggggaaccggggctgtatagcgggaaccgtcatcggcatattcctcttccctccatggggcattattttcggtcctctcgtgggagccgtcattggcgaactgttgggtggcaaactcacacacgaagctctcaaagccgggctgggcgcttttgtaggatttctcttgggggtaattttaaaggtatcgctctgcggttatttcgtggttgtcttcatctctgctctattctgatttctttttccctctctttctcccataagtcgggaaggacttccactgcccattgctggcaagtcaagggaagccttattttgaaatgaaaagtactacctaaaccacttctccttatcgtaccttgcagcattgcagacatttcacatacctccctcgtgttttgctgtgcaaaatatagggaaggagtgaaaggaatatctttctctgtcataccttatgacagagaaagagtttagtcattttcccctgtttcatagaaaaaatggattttaccccattctccttattcctgcttacagttgggcagggagggggataacagatttttaaactcctgcataccttgcgttgtaaaacacaaaagaggaggtttggatatttttccgtgatagcagcgaaccgggaaaaatttaaaatgtagaggattctatactgatattcctaaaatagtgtttatatttgtaactgttgtagctacaacatacatattttattgaagcgtttcgttttatcctaaccttgaaaacgaccaatttttagcagaaggataaacggcacaaacgttcatgcaggcgtgtgcgcattcattgcttaggcaatgttgtcatacagcatgcgtgggttagctgtttatttctgcgtggttacttggtcgtacctcaaggttgataaattgacaggttcccacgcttttctattttaaaaacgccattccgaaggggaacaggaaggcaaaaattgttcattatcatgaaaagattatttgcgtgtgcattattgtcattgttgttatcctcttgttataatgcgagagtctgtgtgggaaatgtacagaaaaacgatcctgtcgtaaaagtaaattcggtgatgaaccatcatttgttgtatggtttgattcctgtcggtaacacgaaaatggaggccaaagagtatgtgggggatgccgagaattatgtaattaaaaacagttggactttcttagatggttttctgaatattcttacatggggtatttacacacctacgaccactactttttatgtacctgtaaatgaaatggggaaatgaaataaacaggtttgtagatgatgtaacctaacttaggcctttaagaatcttatcgattgagataatccttttgtcggaatccgaaggtgatagtgccggataaagacaagaggattattcgttttattttcagtgaggctaatttctgcttggggagtaatccatttcctgagaagaaagacgaaaaaatttttttttcgagcggtatgatgatggttcggtcgatagttcgtggggattgtccttgtatatttcaacccctctcctcagaaacggttgtttcttcggtttctcccctattgcttcgctacaccccgcaatgctacggggcacggcaagggagaggttgatgcccggtttgctgctgtcgctgttttttcaacccctccgtccttcggacacctcccctatattttgtttggcaacaaaacacaggggaggagtttaaaagtaaccctctattcatatagactgagtcataataatggggagagaaggggaaaattttttgcgaaaaacgtcttttttgctatcttagtagcgcaaaaaggaggtaaaaactatggggaaacgagtatatttaggcttgggctcgaatttggggaataaggagcgaatcgtgagaaaagccatcgacaagattggcgaacgggtgggagcggtcgttgccgtgtcgtcgttctataagacggctccgtggggctatcaatcggtgcatacgttctgtaacgctgctattgcagtagataccgatttatctcccgaagaggtattattcaccgtacaggaaatcgagcgggaattgggtagtaaaaagcatcgggaaggagatggcagttatgtcgaccggcttatcgatatagatttactcgactatgacggtttggtgttggatactcactcgctggtgttgcctcacccgtatatgcacaagcggactttcgtgatgaccccgcttgccgaaatagctccgcaatgggtgcacccggtattggggaagacggcaacggagctattggaaggtttacggaacgaaaagtgatttagccccagagttttatttatatgatacgatcggggaaaggcctacaacatagagtgactttgcgtttgccggtacatctctattctatgtacattgtttttcggtaaaattgcaaataaatttgcttttgctttggacttgtactatctttgtagccgaaaatgtggaaggatttggctgcttgcaaccacggaaaaaaatgctaaaactgcgttacggggcttttcgaagcccgtccggctttatcaaatcacctttgttttcgtgggaattgcggtctttcttccttcaataatgtatcactattattcaggagagaaaccaatgaattatttgtttacctcggaatcggtgtcggaaggacaccccgataaagtggccgaccagatatcggacgctttgctcgacgagtttctggcgtatgacccgaactcgaaagttgcatgcgagacccttgtaacgaccggtcaggtcgtattggcaggcgaggttaaatcgaatgcttatgtcgatttgatggaggttgcccgcagagtgattcaccgtatcggatataataaaagttcgtataagttcgatgccgactcgtgcggtattttttcggccatacacgagcagtcggccgatatcaatcggggcgtggagcgcgccgaagcgatgagtcagggggcgggagatcaaggtatgatgttcgggtatgcttgcaatgagacggataattatatgccgttgtcgctcgatttgtctcacttgttgcttaccgagctggccgttatccgccgggaggcttcggcaatgacctatctgcgcaaggggaaggtgacttcgtatttgcgtcccgactccaaatcgcaagtaaccatcgaatataatgaacggaacgaacctgtgcgggtgcatacgatcgtattgtcgacccagcacgacgaattcgtgactccggccgacgactcgaaagaagctcaggaagcggccgaccgggagatgttgcagacgatttacaacgatgtgaaacaggtgttgttacctcgtgttatcgcacaactgcccgaacgggtacgaaccttgttcgacgaccagttgattttattagtgaatcctaccggcaaattcgttatcggcgggcctcacggggatacgggattgacgggtcgcaagattatcgtcgacacgtatggcggcaaaggtggtcacggaggtggcgcattttcgggaaaagatccctcgaaggtagaccgttcggccgcatacgccgctcgtcatattgccaagaatttggtagcggcaggggtgtcggacgagattctggtgcaggtgtcgtacgccataggagtcgccgaaccggtgagtgtttatgtgaatacttacggtaaatcgcacgtgtcgatgagcgatgccgagatagcccgacgggtgtgcgagattttcgacatgcgtccgaaagctatcgaggaacgtttgaagttacgtaatcctatttatgaggagacggcggcttacggtcacatgggaagaaaaccgcaaactgtcgtgaagacattcaaatcgcattataaccccgaaccgatcgttcgtgaggtagagctgttcacttgggagaaacttgattatgtcgaagtcgtgaaaaaggctttcggaatggcatgatgaggattcgagcgatcgtatgtgccggttttgccacggtgatatgattccttgataatgggatattcatgggaaatattatatgactatgaattatatagatatagatagttcgcagcatgagctttacgactcgtggcggaaattgtatactgtcagtttccctatcttcgagcagcggacgcaagagcagcaggaaaaagcgttctcgtgtgccgattatcatttggtagggtatagcgaaggggatatgtttgtcggatttatctcctattgggagtttagcagttataggtatatagagcatttcgcagtgcatcaaggattacgaggacgggggtatggaagtgaaattttgaatgcgtttctccgctcgacctctaaaattgttttgctggaaatcgatcctgtcgttgattctgtttcgagagctcgtttgagattttaccgaaagtgcggcttccatgagaacccttttgcccatacgcatcctccctatcgggagggttatccgcctcattcgttggttgtgcttacatctccccggtctataacagaaaatgagtaccggatttttagcacggacttgactgaggtcgtgatgcaacaaggataaaatttcgagtccttttgttcggaggagtataaaaaaggtgtattcaaagagcggggcttgtaaatcgtacaagccccgctctttgaatatattgtgtttcgattaggaatgatgtgttgccctattgcacggaggctataaggaggatctgtcgattagtggggatatcggttcaatcggaaatcagaggggattgtctttttatatttctacccctatataatctttttaacctcctcgccctgcgggtactccccctatattccttacaggaacacagagggagagggatattctcgatataaactgattgatgtgatgtcttttcaacccctccgtccttcggacacctcccctatattttgctgtgcaaaacacaggggaggaggtgaatccccataaatctccgaagaggtaaaaactgttaatgtgatactttcaatcctctccctctgctcatcgtagatgagatagggggagtgcccgcagggcgagggggttgaactctacaaccaaatgatctttttcaacccttctccttagaaactattgtttcttcggtgtctcctctatatggctaacatagtaccccgtaatactatgggacacggcaggggaggagtagtacgctttgtacagaaatttaagcaagaatcaacttttcaccgaaaagtccggaatgtgtttgttgacaagtggttcatcgctaaaattcatgcctaccctacggattttctactgaactgaaaaaactatgtgtgaaggaggaatcagtaattgctgaaattctggggtttgatgacgaaccctactctcaggcgagaatggaatttgttatagtcgagcagtccttcgccgtaaccgttgtaatattgtataaagaaatattggttttcgttggggaataagcgggcattcagttcgataacggtgttgaaattgaaattccagccgctccgcttggtgagaataacggtagccccgaaccgacgattgtcgcttatgtaactgcctgctaattgaaaaataccgcagtatttgaggatatcccggttgttcccgctgtcgatgataggtatccatgttttgaattgaagttctacattgcgatctacggcgagcgcacccataaacgagattttattccaactgcgagaccaaatgctgtctttcccgttcgattcatgttcgatcaggagcgagacttgtccgataagtctatttcgatgtatgaccagatgcgatagccctatgccgggattgaagttgagatcgtacatcgggagagattcttgaaagacattccaaaatgctttttgcgtataggttataaagaggtaggtgtcgaatggaagtttactttttgtaagtctctggctgatgcttagttggaattttacatcggaatttttattggtcggtttgctcccgatggtcgtacccccgatgaagtagttgtctttgtatagtgaaaaataaggtcttttgtccagctctttgcgcacgctgtcgggattgtatcggggaacatcgtttcggatttgggtaaaacccggaatgcagagcagaactatcagcagtaagataaacaatcgtttcatatacaaatataacaaatggtgggagaaatgaaaaatgaacttgttcatttttttatttcgaaccgcatctatatccgatacattccgatatagataattgtgcaaatatatgctatatcggctttattttataggtaaaaaggtcgttctttttcgccggtttttccattgttgtcgggttttatactttgttttgcccggatattgttttgctcctcccgtaaaatccagtacatttgcaagaaatgaaaatgttttttgcatgaataaaataggtgcggtactgtgtatttgtgtccttttgctgtcgggttgcggcggcaaggataacgagtttgtcgtggagggaactatcaataatttaggaggacgccctatttatgccgtttatagtcttgaaaacggcattgtcgtagatactctccgtccgcagaatggttttatcacattcaaaaactcggcttcggaacttattcccatacagttttattatttcgataaaacgtccttgaccaagatatatgtgcagaacggcgaccggatagaattgtcgggcgacgggcaggatcctttcgggttgagagtgaaaggaagttctctaaataaggatttgtttaagttcaatcaagagaataaagagttgttgcagtcttggtcggcagaaaggaacatttcggcatcgggaatgagaacccggcgatacgagcagttgagcaaggagctgcaaggcgttgtggcaaagtatgtaggcgaacataaagattcgcccgtgagcgctattttgttagatgattatgtattgggaagggtgagcgatgcgttttgcgattcgttgatcggtttgttggacgaccgtgtactgtcggctccgccggccacagcattggaaatgtatcgacaatttgaaaccatacagaagagtgacaccgtattgccttatttatcattgactacggtggccgatacgaccgaattgctgaatccccgagaagcccaagcgaccctgctttgtttttgggctgccgagacacccggaacacagaggtacagcggctttttaagggagatagcagaacgatacgattcgttggtgcgggtcgtggaaatttcgctggatagggacagcgccgtatggaaggagcgaatcgaggccgattcggccgtatgggcccggcggtgggcgaaaggcggttatctttatccgggggtgaaagagcttcatatccaaagcataccttatctgttggtcgccgattctttggggcggattgtcgccagagggctttcgcccgactcttcgagagtttatatcgaacgtttagtaacaccataacctattactgcaaaatctattactatgttggtgaaagtttttggcgcagccgtgcagggtatcgatgctcttgtagtgactatcgaggtgaactgttcgcagggtatccgtttctttatggtgggattgcccgatgcagccgtgaaagagagccacgagcggattgtctcggccgtggaacataacggttacagatttccgaggaaacaggtaatcgtgaacatgtcgcctgccgatatacgcaaagaaggagcggcgtatgatttgcctttggctgtggggattttggcgagcgacgagaagatagaaacgggtaaattgagcgagtatatgttgatgggggagttgtctctcgacggttccattcttcctatcaagggggcgttgcccatagctatcaaggcaagggaggagggctttaaggggttgattattcccaaagccaatgttcgcgaggccgcggtagtcaatcatctcgatgtgtatggcgtagagaatatcaccgaggtgattcgtttcctgaacggggagatcgagctggaaccgacggtgatcgatactcgtgcggaatttttcaaggaatatacccatttcgatttggatttcagcgatgtcaaaggtcaggagagtgtcaagagggctttcgaagtagcggcagccggcggacataacatcatactcatagggcctccgggcgccggaaaatcgatgatggcgaagcggttgccttctatacttccgcctctcacattgcaggaagcactcgaaactaccaagatacattcggtcgccggacgtatggagcggggtagttcgctgttgtcgcaacggccgttccggtcgccgcatcataccatatcgtcggtagcgttggtgggcggcggggcttttccccagccgggtgaaatttcattagcacacaacggggtgctttttctcgacgagttgcccgagttttcacgtcaagtactcgaagtaatgcgccaaccgctcgaagaccgcaagataacgatagcacgtgcgaaatactcgatagaatatcccgccggggtgatgttggtcgcttcgatgaatccttgtccttgcggatattataaccacccggagaaagagtgtatatgcagtccggggacgatacaacgttatttgggaaaaatctcgggccctctgctcgatcgcatagacatacaagtggagatcgttcccgtcccgttcgagaaaatctccgacacccgtccggcggagtcgagcgagtcgattcgtcaacgagtcattgccgcaagagaaattcaagccgcacgcttcgccgactatcccggcatctattgcaatgcccaaatgactacccggttattgaaccggttcgctgtccccgatgaggcgggattgaaacggctgaaagatgcgatgaaccgtttccacctgtcggcacgggcctacgaccgtattttgaaagtggctcgtaccatcgccgatttggaaggtagcgaaggggtacaggtgcaacacatcaacgaagcggtgaattaccgaaatctcgaccgggagaattggggagataggtagaaattgtttatcttgcagacctatattaaagtatagtgaaactcagatgtaacgatatgaagaacataaccgtatttttggcatccagcgacgagttgaaaaacgaccgtaacagtttccattcgttggtggcttctttggacgaaattttcgagcctcggggatatcgcataaggtgcagacgttgggaagatttttcggcattttgcactggaacccgtactcaggacgactacaaccgcatagtacgtgccagcgatatttgtatctgtatgtttcaccgcaaagcgggagaatacaccatagaggagttcaatcaagccttagacgaatatgtgaagaatcagagtcaccccaagacatttgtctatattcgagccttgatagaaggtgaaatggaagacgaggcattgaaacgattcaaggaagatttgttcgatcgggtggggcattattggtgcaactatgccaccgacgatgccatgaagttgcattttgtcatgcagttggagcggatcattccatcggtatcgggcaacgcttccgtaaccgagggtaaccactttaagatagagaacggagtcgtttcgctttacggccacaagatagccgaactggacaatctctcttttgccgctgagaatccggaatacctttcgttgaaagagtccattgcccgattgaatacagagatcgcccgactgagagcgaccggtgtcgccgagcttcaaccgataattgatgagaaacaagcggaactatacaagaaacgggaaagtctcaaccgattggagagccagctgttcgatctcgctctgtccatcaacaagctgatcgggagcggaacgccggtgagcgagcgcaaacggttggcgatagagatgttcgagcgagggaacagcaaaggggtcgtggaaattttgaatgaaaaagatatcgccgccgatgccgctcaggcccgcaaggagatagagcaagggaaactactggtcgattccggtcggtcgcttatcgaggcgggacttcaaaagacacgatcgttggccgaggagtatgttttgcgggcaaaggctttgatgacagactatgcagagcctcgtcgcttcgaattggcttgccatgcctatgagcagggtatcgagctaatccgagccaacctttcggaggaagagttggcaaaaagtttgtttgagtatggtcattttttacagacaaacaaacgatacgatttggcggaagctcgttatcgagaaaatttagacatctaccaacgacttgaggtcattagtccacaggcctacgagccgggcttggcaacgacacaaaataatttaggtcttttgtacagcgatactcaatgttatggggagagcgaagagatgtatctctctgccgtggagatttatcaacggttatccgtagtgaatccacaggtgtacgagccgtatttggcaacgacacaaaataacttaggtcttttgtacagagatactcaacgttatggggagagcgaggagatgtatctctctgccgtggagatttatcaacggttatccgtagtgaatccacaggtatacgagccggatttggcgagggctcaaaataatttaggtcttttgtacagcgatacccaacgttatggggagagcgaagagatgtatctctccgccatggagatttttcgagagcttacggtggctaatccacaggcctacgagccggatttggcgaggactcgaaataacttaggtaatttgtatagagatactcaacgttatggggagagcgaagagatgtatctctccgccgtggagatttatcaacggttatccgtagcgaatccacaggtttacgagccggacttggcaaggacacgaaataatttaggctgtttgtatgacaatacccagcgctacaaggaaagcgaggagatgtacctctctgttttgacggtttatcagcggctcacgatagcgaatccacaggtttacgagctggatttggcgaggacacaaaataatttaggcaatttgtacagagatacccgacgttatgaggatagcgagaagatgtacctctccgccgtggagatttatcaacggttatccgtagcgaatccacaggtttacgagccggatttggcaatgactcaaaataacttaggtaatttgtacagagatacccaacgctacaaggaaagcgaggagatgtacctctctgttttgacggtttatcagcggctcacgatagcgaatctacaggtttacgagccggatttggcgagggctcaaaataatttaggcaatttgtacagagatacccaacgctacaaggagagcgaggagatgtacctctccgccgtggagatttatcaacggttatccgtagcgaatccacaggtttacgaaccggatttggcaatggttcaaaataatttaggtcttttgtacagcgatatccaacgttatgaggatagcgagaagatgcacctctccgccgtggagatttatagacgactcgcagcggcgaatccacaagtctacgagccggatttggcggagactcaaaatgatttaggtattttgtacagcgatacccggcgttatgaggaaagcgaggagatgtatctctctgccatggagattcgacgacgacttgctgtggctaatccacaggtttacgagccgggcttggcaaggacacaatataacttaggctgtttgtacagcgatacccgacgttatgaggagagcgagaagatgtatctttccgccatggaaatccgacgacgacttgcagtggcgaatccacaggtctacgagccggatttggcagatactcagtataacttaggttgtttgtattacaatatccaacgttatgaggagagtggggagatgtatctctctgccttgaaggtttatcaacggctcacggtagcggatccacaagtgtacgagccgtatttagtacgagcatgcaataacctttcattcttatttctcgctcagggtaattttgaagaagctgaacggtatgcccgtgagggagcaaaatatgattctactcatcataccatttatacaaatcttgcggcatcccttctttttcaaggtcgatatgccgaggcggaagagatatacctgcgatacaaggaagagctaaaagaggactttctctcggatttcgaagatttctatcaacggggaattattcccccggaacgggaagacgatgtggaacggataaaaaagctgttgtcgaaataggcagagacatacattcggtcgggatcgctgcgggtgcggattagggagtataacgcatcattggataaacgagccgagtcgcttgtatactatacagaaaaatagaattcggatatggaaacaaagaaaaacacacgtttgttgtcattggatacccttcggggattcgatatgctttttattatgggtttcgccccgttggtagtcgccttgaatgccttgcacccgacggcggtgggcgatgtcatagcggggcacatgcggcacgtcccgtgggacgggtttacccaacacgatatgatattccctctgttcttgtttatcgcaggtatatctttcccgttttcattggccaagcaaagggggagcggatcgagcgacaaacacatttacctgagggttctccgccggggtgtcaccctcgttttgctgggattcttgtataacggattcttacagttgaatttccccgatgtgcgtttggcaagcgttttggggcgtatcgggctggcgtggatgttcggggctttcatttacatgagtttgaaaaagtcggtacaatatggtttgattgtctttatcttggtgggttattggttgctgttggcttttgtgccggctcccgatgctgcgggggcttcccctctttctatcgaagggaatctggtcggatatatcgatcggcattgtttgccggggaaattgatatacggtaatttcgacccggagggtttactgagcacgcttccggcgatagtcacggcattattgggaatttatgcgggggaaatcgtccgttccacccgcttgggaagcggagagagaaagagtttgctgttgtcgggaatcggggttgtgttggtcgccatagggctggtttggaataccgtattcccgattaacaaaatgctttggagcagttcgtttacctgtttcgtgggaggactttcgttcttgttgttcgctttgttctattatatcgtcgatgtgaaagggtggaaatcgtggactctctttttccgagtgataggactaaattcgataacgatttatctggcgcagcaggtggtaggattttctcacatgaataagtttttgttcggaggtatatcccaatgggtgggagaatgtgccggtgagcctgccggtgcggtcgtccttcgtgcaggatatgtcgcttgttgctggttcttcctttattttctgtatcggaaaaatattttcctgaaagtatagtttgtcggtggtgaactcgttccatctcatctacgatgagcaggggggggagaagtcttgtctctgttgcttttactgctggtatttctttaactcctccgtcctacgctatattttgtgttgcaaaacaccccgtaatgctacgggacacggcaaggggaggagtataggaatctttcgatggcatcgctctactgttttttcaatccttctgtcctgtgggcattcgtcccatcttatttacgatgagcagggggaggagccctgcctctgctcttgctggtatttctttaacccctccgtcctacggccacctcccctatattttgtttgtcaacaaaacgcaggggaggagtgtaggaatctttcgatggtatcgctctactgttttttcagtccttctgtcctgtgagtattcgtcccatctcatctacgatgagcgggggagaggagccttgcctctgttgctcttattgctggtatttctttaaccccctccgtccctacgtgccacctcccctatattttgcgttgtaaaacaccccgtaatgctatgggacacggcaaggggaggagcgaaatgtttcgaatgttacaaggtctggcgggagggctgtttcaatagagaagcataaatcttactcgtcgttttaagagctgactttttgtttttcgaaacgcaggggagaggaggaaacggggagtggcagcgatgaagaggggaatagaaaaaaaataaaaacggtttcttacatttttttaatttcacaattccggtcgaaaatgttatctttgtttctcttaaacaggattattcatacgaatataaaagaaatatatcgtggccaaggaaattgtcgaaactccgctgatgaaacagtatatcgagatgaaagccaagcatcccgatgcgatattgcttttcagggtgggagacttttatgaaacgttttcggacgatgctttggtggcatcggaaatattggggattacattgactcgccgggcaaatggagccgcccagtatgtggagttggccggttttccccatcatgctctcgatacttaccttcccaaattggtgcgtgccggaaaacgggtggctatttgcgaacagctggaagacccgaaactgacaaaaaaattggtcaagcgcggcattacggaattggtaacaccgggtgtgtcgattaacgacaatattctcgatcaccgagagaataatttcttggcgggtgttcatttcgggaaaggtaacaaagtgggtgtggcttttctcgatatatcgacgggtgagttcttgaccgccgagggagatttcgactatgtggacaagttgttgggcaatttctctccgaaagaggtgctgttcgaacgcacgaaacggaaattgttcgaggagcatttcggttcccgtttttttactttcgagttggacgattgggtttataccgaggatgccgcttcggatcgcttattacgtcacttcgagacgaaaaatctcaaaggtttcggaattcacaatatgcccaacgccattatcgccgcggggtctctgcttcattatttggatattacgcagcatacgcagatttcgcacattacatcgctgtctcgtatcgaggaggagcggtatgtgcgattggataaattcacggtgcggagtctcgaattgctttctccgatgaacgaagggggaaagagcctgctcgacgtgatagaccggactgtcaccccgatgggggcacgtatgctcaaacggtgggttgtctttccgttgaaagatgtgaagcctatcgaggatcggttgaacggagtggagttctttttccgtcaccccgaagttagggaggttatcgatccgcaactcgatacgataggcgatatggaacgcctcatttcgaaagtagcggtggggcgtatttcgcctcgcgaggtggttcagttgaaggtggcattgtcggcgatagagcctatcaaggctgtttgcgagcagagcgatgaacctgtattgcaacgtatcggggagcaactgaattgctgtacgatcatcagggaccgaatcgagcatgaaattaatcccgatgcgcccaatttggtgaatcggggaggaattatccgcaagggggtgaacgacgaactcgacgagttgcgagaaatttcctattcggggaaagactatttgttgcacgtgcagcagcgcgagagtgagaaaacgggtattcccagcttgaaaatcgggtataacaacgtattcgggtattacatcgaagtgcgcaatactcacaaggacaaggttccttccgattggatcagaaagcagacgttggtgagcgcagagcgttatatcacccaagagttgaaagaatacgaggagaagattttgggggcagaagagaagattctttcattggaaacgcagttgttcaatgatttgattcttgcattgacggagtatattcctgccatacaactcgattccaatctcattgcgcggctcgactgcttgttgtcgttcgtgaagtcggccgtggaaaaccggtatattcgtcccgaagtaaacgattcgctggttatcgacatcaaggaaggacgtcacccggttatcgagaaacagttgccaccgggcgaaccctacatcagcaacagtgtcgagctcgacaacgacaagcagcaaatcatgatgataacgggacccaacatggccggtaaatcggcgttgttgcgccagaccgctttgattgttctgatggctcagataggaagtttcgttccggccgaggccgctaagatagggattgtggacaagattttcactcgtgtaggggcatcggacaatatctcgctcggcgaatctacctttatggtcgagatgaccgaggcagccgatattctcaacaatctgtcggagcggagtttggttctgttcgacgagttgggacggggaacgagtacttacgacggtatatctatcgcgtgggctattgtcgagcacatacacgaacaccccaaagctcgtgccaaaacattgttcgctacccattatcacgagctgaacgaaatggaacgtacttataaacgcattgtcaattataacgtttcggtaaaagaggtcgacaacaaggtgatattcttgcggaaattggtacgcggcgggagtgagcacagtttcggtatccatgtggcgaagctggccggtatgccccagagcatcgtcaagcgggccaaccagattttgaaacagttggagtcggagaaccgccagaacggtatcgccaagcctaccgccgaaatcgcttcgtcgagaggcggcatgcagttgagttttttccaactggacgatcctgtgctttcacaggttcgggacgaaattttacaggtcgatatcaataaccttacaccggtagaagcattgaataaactgaacgaaatacgaaaaataatcaccgggaaatagaacggtttgtttatgatgaagagaagcgattttgaaattatggcgccggtgggttcgtacgattctttgacggcggctatacagggaggggccgattcggtgtacttcggtatcgaggggctgaatatgcgagcccgttcgtcgaataattttacgatagacgatttacacgagatcgtgcgtatttgtaacgagcatcacataaagagttatctgacggtcaataccgttatctacgacgaagatatacctctgttacatcgtattatcgatgcggcgaaggaggccgggctctcggctattatcgccagcgatgtggcggctatgacctatgcccgcgagataggggtagaggtgcatttgtcgacccagctgaatatttccaataccgaggcgttgcgattctatgcccgttttgccgatgtggtggtgctggcccgggagttgaatatggaacaggtaacccgtattcacgaagctattttgcgggatcgtatcgtggggccgggcggagaaccggtacgtatagagatgttctgtcacggggcattgtgcatggctgtgtccggcaaatgttatttgagccttcacgaaatgaatgcttcggcgaatcggggggcttgtatgcagatttgccgccgttcatacgaagtgaaagacaaggagaccggtaacgagttggaagtggacaacgcttacatcatgtcgccgaaggacttgaaaacgatacatttcctgaacaaactgatcgattcgggggtgcgggtatttaaaatcgagggtcgcgcaaggggaccggaatatgtgcgtacggtcgtttcgtgttacaacgaggccatcgagtcttatttgaacgacgactttaccgacgagaagattgcactgtgggacgaacgactcgctaccgtctttaatcgagggttctggaacggatattatttaggtcagcgcttgggcgaatggactcataattatggctcgggagccacgaaacgaaagatatatataggcaagggtgtgaagtatttttccaacctcggtgtggccgaatttctcatggagagcggttcgttgagcgtgggagacgagatactcgtcaccggcccgacgaccggtgcgcttatccgcaaggtggaagagatacgagtcgatttgaaaccggtacaaaagacggtaaaaggagagcggttctcgatgcgtatcgatgagaagatacgaccgtcggataaattatttaaatgggtggatagttcggaacttaatacaaaataaagatgttcatgaaacgggcgatagttatactttgtggaatcgtatgcaccggacagcttttggccgccaagccgggaatcccggcttataacgatgacagggctttgatagataggggaatctttctctttcaagagaagaactacgcgggttgtgccgatgtgatgaaagaggcttgtgaaggcgatttgtcgcctgagcagcgggaaacggccgactggtatatcgctctttcggaagcccgcaattattcgccgcaggctgtacggcggttaacggattttttgcgaaattatccggattctaaacatactttgcaggctcggttggcattggccgattattattacgacagccaagattatgcaaaagccttgaaaacctatcagacggtaaatgtgagtctgttgaccggcgacgaggaggaccggtggggatatcgcacggcatgttctttgttgaagaccggtaatcccgatgcggcgaaaccgctgtttcagcttctaatcgggaaagagagatttcggacaggagccacgttctacctttcgtatatacagatgaacgagggagacgatagagccgctttaagcggattttcgaaagtggcggacgacaggagtttcggatatgccgcacggctgcacatgttgcagatttatttcgggcaaaaacgtttcgcacaggtattgtccgagggtaaagcgttgttgtcccgtccgtcttctgatgccgacttatacaccgagcttcttcggttgctcggcgaaagcgcttatcaagaaggagacgataaagcggcgacggaatatttggaaaggtatttgcaacgatgtcgcaaacccgaacgctcttctctttatgtcatgggtgtcatggcctatcgccggggagaagatagcgaggcgatcgattatttggggcgtgtgaccggcgtggacgatgctctttctcaaaatgcttatctttatatcgggcaagcctatttgcgagcgggagataaaaataatgcccgcatggcgttcgagatggcttcacaagggaattacgaccgtcaggttcgggaaacggcgctttacaactatgcgctctgcctgtatgatcgcacggcttcgcctttcgataactcggtgggtgtgttcgaacgtttcttgaacgagtttcccggttctcgctatgccgacaagattaacgactatttggtagaagtttacatgacgacccgtaattatcggtcggcactggcgtctatcgataaaatacggaagcccgacgggaaaatactcgccgccaagcagcgcattcttttccagttggggacggaggctttcaccaatgcccgtatcgccgatgccgaaagtttgtttagccgggcgatcgctgtgggaaactatgataccgatatacggggtaaggctgcgttttggctcgccgagtgccaatatcgtcgggaacaatacgacatcgctgcccggaattattcggcatatctttcttccagcaaggacaagcggagcgaaatgtattcgctggcttggtacgattgggcctactgtcaattcaaacagcataacttctcgcaagccctcgacggtttttcccggtatgtctctgtacagaccggaggaaatcgaagcatgcttgccgatgcctattcccggataggcgattgctattattacgcccgtcggttcgccgatgccgagcagtattatgcccgggcccaagagaccgatgtcgcgaacggagattatgccctttttcaaaaagctttcatggcgggattgcagaggaatcacgaacgcaaaatagagttgttggacaaattgattgtagattatccccgttcggggtatctggcgaacgcatggttcgaaaagggacaggcttatacgatattgaataggaataacgatgctatcgtatgttacaaacagttaatcgccgattatccccagagcgcgattgcccgcaagggaggtttgcagttgggtatggtctatttcaataacgggcagacagacaaatcggtggctgcttaccagcaagtgatagagcgttatccgaccagcgaggaggctcgcatagcggtcgccgacctcaaatcggtatatgtagagaaagatgcagtcgatgcctacgctaactatctgaatagcgtgggacggtcggagcaggcccctgtgagcgaattggattctttgtcgtatatggcagccgagcgcacttatatgacggggaaaggtatcgcttcgttggagaagtatgtacgaaattatccgtcgggcgcgtttttgattccggctaattactatatcgggaaagtatcgtttgcagcgaaagactacgacaaagctcttccagcgttcgactatgtggtgacgaacagtcccgacggcgagtttgccgaagaagcattggcccgcaaatgcgagatactttatttgaaagctcgttatgacgaggcttttgccggattcaaggagttggagaagaaagcgactgtcggcgagaacaaacaggccgcccggttgggtatgcttcgtattgcccggaataagcggcaatatggcgaggtggtaacggttgccgacaagttgttgagcgaaagcaaactttctcccgatttgcggcaagagattttgtttgctcgtgccgatgcctatttccatacgggaaagggagaaaatgcggccgatgactggcgggagctttcgaaagatacccgttcgatttacggggcgcaaagtgcctatttattggcccaatatcaattcgacaacaaagcgatcgatacggccgaaaagacgctgaatacttttatcgacaaaggtactccccacaattattggttggctcgggcattcttgctcatggccgacatttatgaaaaacggggcgagactttccaagcccgtcaatatttgcaaagtttgcggaataactatccggccagcgacgacgatattatttcccggatagacaagaagttgagcaagctgggacaaacagagtagttgaacgatacaatatgtatggcttatgaaacggttttcttttttaatcatatcggttttcccattcttcctgtcggcacaggtacgttccgattcgttgcggcgggaagtaaccatagaaaaagattttacacctatcgtgcgcgatgcgtctaaaatcaatacattgcccgaagtggaagcaccgacggtaaccaaacaatctatacggtatagcgactggacggttccggctcccctcgaaccttgcgctgtcttgttggctcccggcggtttcggagaaaaaaccgaagaaaaccaatcgaggggatacgtggatttcgggataggcaattacctgaatatggtcgggaatgccggttatcgtattttgcagaatgacaaagacaagttgggtgtgtggttgcaacatcgctctacttgcggaacggtggattacaatcaatcgttaacggaggactatcccgactcgaagaagatgcaccggctcgaagagcgagtggtcgccaattatcttcactccttcgggaagctggatttgggaataagcggcggttatcgttacgactccttcaactattacggattgcgatactccggtttgacgggaatatcttcgcctaaccaagagataaaccggttcttcttgaaaagccatatagcctcgactgccggagagtcggacctactttataaagtttcattggcatattaccggtacgggtatcaccggggatatttacaaggtgaaaaaggggctgccgagaatttagtaaatgcagactttacactgtctgcgccgatcgacagacgtagctctatttctttggacggttctttcgattatgtgggttacagccggttgcagtcggcagcgaattacggtatgatttcattgaatccccggtatgactggcggaatgaacacgtggcttttgctatgggtgtcaaggccgatgtttctttcaacaacggaactattttgcgattctctcccgatgttcgattcgattggacgatagttcccgatgtacagttttatacggcttttacgggcgggaagaaactgaatacgtggcgaagtgtttcggcctatacgctctacttcaatccgtcgacacaggtagataatacgtatgtgccgttggatgcctcattgggaatacgtattaacgcattgcccggattttccgtagggctttcgggcggttatgaaatttgtaaaaaggcgttgttccttttgcccgaagatttgaacggagagtttacaggtgtgtcgcgtttttggggtatcgatgccaatgctttgaaagcagagctcgatgtatcttatcgttacggtacgaaattggaggcttcggcgaaggtcgggtatcaccgatggaagaccgccgatgggggggagacgatttcgtataaccgtccgcagtgggaaggaggagtgaatatccgttatatgcctgttcgcccgttcacgctcgaagccggatatgagtttgctgcgggtcgggagtattcaaatctcggaaagctctccgatatacatctcgttcacttgaaagcctcgtatgctttcacttcttggttttcgctttacggacttaccgacaatgtgctgaaccggaaatacgatattctttacggtatgccggcacaaggcatcaatttcatgttcggggtcgatttgaaattttgagggtaagaggtctgttctcgacatttttaacccttccatcactatgtgtgccacctcccctatatgactaacgccacaccccgcaatactacgggacgcggcaggggagaagattggatagtttcgacttgctgcacaaaaatgccaaactataaaataaaaagtaccaccctcctcccctgtgttttgttatgcaaaatataggggaggtgtccataggacggaggggttagctttacaaaaaaaatcctatacgctgtcttttttagccccctcctcagaaactaccgtttcttcggtgtctctcctataccgctaatgcaactccccgtaatgctacgggacacggtaggggagaagaaggatttaacctctcccaccgtgtcgggagtactcatgggacgagtgggtagtttaaaaacaggatttatctcgtcagctttttcggagggaatagtataggagaatggcgttggggaggatatgcgacaaaaactctacatggtaggaacgattcaaaatgtgtgcgatatacattatttaataaaaaagtagaaaaaagctctgtattacaatctgtttttctaattttgcgcaaaatttgaacgaacattgcgcatatggcaaaaaatttggtaatcgtagagtctccggcaaaggctaaaaccattgaaaagtttttgggaaaggatttcgaagtcctttcgagctacgggcatatccgtgatctcaaaaaaaaggatttcagtgtggatatcgagcataactataaacctatttatgaaatccccgccgacaaaaaaaagttggtggaaacgctgaaacaggaggcagacaaagcggatatggtttggctggcttccgatgaggaccgtgagggagaggctatcgcatggcacttgttcgaagtgttgaaattgaaaccggagaaaacgaaacggattgtattccatgagattaccaaagatgccatacttcatgctattgagaatccccgggatatagatttgaatcgggtagatgcccagcaggctcgcagggtactcgaccgtatcgtgggatttgaactttcgcctgttctgtggaaaaaggtgaagcccgctttgtcggccggtcgtgtacaatcggtcgcagtgcgcttgattgtagaacgggagcgagaaatctcggcgttcaagcccgaagcagcctatcgggtgattggggaatttttgttacccggaggggaattgttaaaggccgaattgagccaacgattgaaaaccgaagacgaggcgaaggctttgctcgaagcctgcaagaccgcacagttctctatcggagacgtgacggtgaaacctgcaaagaaatcgcctgcggctccgttcaccacttccacattgcaacaggaagctgcccggaaattgggcttctccgtggctcaaaccatgatggtggctcaacggctttatgaggctggacatatcacctatatgcgtaccgactcggtgaatttgtcatcgctggctataaatacgaccaaagacgagattgtgaaaactttgggcgagagatatctgcatattcgaaattaccatacgcataccaaaggagcacaggaagcgcacgaggcaatacgtcccacgtacatcagccatcacgaaatcaatgcttcctctcaggaaaaacgattgtatgaattgatttggaaacgtacgatcgcttcgcaaatgagcgatgccgagttggaaaagacgactgcgaccatcgccgtttcgggaaggaaagaacacttcgtcgccgtgggcgaggtcttgaaattcgacggtttcctgaaagtgtatatggagtctaccgatgacgaaggcgatacagaaggaaacgacaagatgttacctgcattggcgaaaggcgatgtgctgacattgtcgtcggtcacggcaacggaacgtttctcgcaagctcccgcccgctataccgaggccagtctggttcgtaaattggaagagctgggtatcggtcggccttctacctatgcaccaaccatttcgaccatacagcaacgcgaatatgtcgagaagggcgatcggaaaggaacggagcggaaatatcgtatgttgacgctgcacgatgggaaaatcgaatcgggagagaaaaccgagctcacaggagccgataaaggcaaactgcttcccaccgatataggagttgtcgtcaacgatttcttgacggagtatttccccgatattctcaattataactttacggcgaatgtcgagcagcaattcgacgatattgccgagggaaaaaccgtgtggaacgatgagatagatcatttttacaaactctttcacccggtggtagagagcgctctcgctttgcggttggagcataaagtgggcgaacgggtattgggtacggacccgaaaagcggtcgtcccgtatcggtgaagataggccgtttcggtccgttggtacaaatcggtactcccgaagatacggagaagccgttgtttgcctcgttgctcaaaggacaatcgatgagcacgattacactggaagaggctttgaaactgttcgatttgccccgaaccttaggcgatttcgaaggtaaaaccgttgtcgtgggtattggccgtttcggtccgtatattcgtcacgacggcaaatatgtatcgttgcccaaagagttcaccccacagggtgtttcgttagaggatgcgataatgttgattcagcaaaagcgtgagcaggaaagtcaacgctttatcaagaagttcgatgaagatgatgaactcgaactgcttaacggtcgtttcggtccgtatatcgcttataaaaagaagaattataaattacccaaaggttccgaaccggcatcgctcacgttcgccgattgcatgaagattgtcgaggatgccgacaaggctcctgccaaaaagaaaccggcccggaaaaagacgacgaaataaaagagatccaatggaatattgcggggtatgctcgaaagttaaatacttttgggcatactttttttagaagctgttttaaatttattgggaaataatattatcattgcaggcaggtatgttccggccatattgagtccccgtctcgcatcttgaatcccttgatttttgtcaatagcccgctattgactgcatatctcggactccaatctgcttcaacataggtctcaatctgtctcggaataaatttaaaacagcttctatgtattcgatattttccgatgattcttttatggcgttttgaagggtgaaatagaggggaccttgatgtgcgtggtttgtttgttgtactgttgtaagtgaaaatagatctcggaatcgggagaaaattttggaatagtgattaggtgattggtgaaattgcgggataggtattacttttggaatcataaaacagaggatttgtgttatggcgaaagaacttttcaatcggtatgtatggctgatcgatacgttgcagcgttacggaaggcttacccgcagggagatagacgggttgtggcaacggagcgaatattcggacggcaagccgatggctcgacggacgtttatgaattatcgtcaggccatacaggagatgtttgacgtgaatatcgagtgtgatgcttctacgtatgaatattacatcgaggacccggatgctttgcagggaaacggtgcacgtgtgtgggcattgaacacgcttgcggtgagtaacatgctgaacgagagtcaggagttgcggaatcgaatcgttttggagaatataccttcggggcagaaatttttgagaatcgtcttcgaggcgatgaaggagaaccgggtgcttattttgtcgtatcgttcattccgacgtgtaacaagttcgcatacattggcggctccctatttcgtgaaattatttcgtcagcgttggtatgttatcgctaaggattttacggatcggaaaatcaagacttatgctttggatcgggttgcttctctcgaattgagcagccgtacattcgtctatcccgacagtttttctcccatcgattatttccgggattgtttcgggattacgcacgacgatatgccggcgcaggaggtggtgctgcgtgtccctgctttgcaagctaattatttgaggacacttcctttgcacgaaagtcaagaggaacttgaccggaacgaacatggctctacgtttcattatcgtttgaaaatcactcccgatttcgaacaggaggtgtatgctttggggtattggcaagctgaggttttgtctccgcagactttacgcgatgcggtggctgaacggttgtcccgaagtttggcgtgttacggaacggcggggttatcttgccatgaacacaggacgtagaaggtatttattttttcctttcatcgccgaaaagaaagaacccggaaatgcagccgctttttgtagctttattgcccgataaaggaggggagaatcttgttcttttctttatatttcaaccccctcgccctttgggcactcccccatctcatctacgatgagcagagggagaggattaaaagcgacacttcgatcggccttttgtgctttctttttgctttgtaagtactttctattcctttacagaaacatagggagagagtgatgtttttatatgcttcctctgctatggatattttttaacctctccgtcctgcggacacctcccctatattttgctatgcaaaacacagaggaggttaatactttcctgtgtattgtgtttgttcttctcccctgccgtgtcccgtagtattgtggggagttgcggagcaataggggagacacagaggagcggtagtgacgatgagaggggttaaaaaagataggatttttgtagaactaacctttccatctttcggataccttccctatcacattgcatgcgcaggaggtcagtttttagctcttgcccatgatataatgacagatagtttctattctcccgtatacacggctttcatagagcctaaggggagtttcccttctactttcaagggtatgcgtttattgtcggtagagatccatgccgagattttgtcgctggtctttttgccggttctgtcatagaatcggaaatgaagtttgtaggtgctgtattcctttttgttttgtttgaggatttcctgtcccaaatattctatttcgaggtattcgaggtttttaccggagaaaattttggtgttatagatttgatacatttccattgctcggaagtcgaaggtgcgaatcacgtaaaagatactcagcatgtcgtagactataccgggttcggtgagtgtatagtcctctatggcgttacgcttgggccgatataggcggatatttcccgtggtcgagtttccatcgtaggtataatttacttcgtctttccggtaagtcccgttttcgtcagcgagtttggcgtaataaatgggtagcagttctttgtttcgctgcatatcggataccagtgtgtcgcgtactttgaatatgttgtcggcaaaggggagtgtacgagcttttaaaacagatgtatatttgtcggggtattcggtgagttggagcgtagctgtcgctgcccgcttccagagaaatcccagttggtatatgacatcgtaggatagccattcgggttgcatacccggagtcgtttgcgcataaattccgttcgccatactccaaaaaagaatcccgaaagtaatacggcgtaacgacccggtgtttttcatataacgatggcgtagcatgcggtttgttattaagattgtcagtaatttcgttttttctctttgggcttgtttttctttattttgtcgggtttttgtttatcgaccggtgtcgcatagatgtcccaatcctgttctatatcccaattggctttcagttcgagttcctgtgggtaatacgaaacttcttcgggctgtcttttctcggagtagttcccggtgtcgtatttcccgtttccgttacggtcgataaataagcgggcgtagtaagtacccggattcatatacatgaactcggctcctccattgatgaccggggctgttcttacgggtttgtctcctgaatcaagaatttcgacaaaggcggaatcggatacgcccgaaatagagagatacagattggcgtaatcttcgagggctttgactttgaattcttgtttataggtgttcgtgaatagtccgtaaatattggtgaatgccgtggagtccataacgatgcgataggattctcccggagtccatttgtaggtgagtgtgtagtcccggatagcaatggagtcttggaggaatgtgtacagggagtcggcaacaggtatccacaaggtgtctcttttttgttccagatgtattttccctgcatcgtatgtttgcaatggttcggcaaaggaaaaacgaagcggtttataaacatcgagagaagagcttatcttggcgttcatttgcatgaattggatttcgggaacttcgatggagtcgttgtccttgtctttctttttttcttttttcttgggcgctttgacttttttcatgatgaatttgagcgtatcgttgtagagagacaattgtcttaacgtgtcggtacggagatattcggccgtgaataaaagtgtatccatgttgtaaatgagcgagtcttttatccagtattgcagcgtgtcgttgtggaacgagcgttcgagaatggcccagtcttcttgctcgaaattcagcggtttcagcttgggcaacgaatcggcgggagctttgaaataaaggtcgattttacgacggtcttttctttcgcttttgtcgagatattgagattggaatccttcgttgaatgccgtgagcagaatatcgttcggatagaaatgggtgtggttatattcgataatggtgtcgatggtgacgctgtctttccaaatggtgtcgacgtgtaatttaacatcggccgaaggaatgacgatagaatcgagaaaagcgatatcttccgacgggttgtcgaagcggtagtcccggttcatgtctttcagcgcgaatagacggtatttgccgggtgttacatttcgtatcgtgaaatgacctaattcgtcggaactggcaattctctctaatgggagtttctggaaagccgagtcttcgaggtcgctgtgtaatcctaccaacatgccggttatgggctccaaatcccgggcattgagtagtattcccgaaacttgcagagagtctatcttggggccggtcgaaaaggagtaggcgaatccatagagcggattgcgctcgttgttgtcgatgatggcatcggaaaagtcgatggtataggtcgtgttgggtagtaacgagtctttaagaatcacggttattttacgtcccgaagtacgaatttcgggcatatctttttgggggggagagacgattactttttcggacggtttgtctacttgaatgatttcgtcgaattctatttcgactttctgtttcgaaacgttcaatgcgttaggaaccggagtactcttgatgaatacaggcggtgtttcatcgcggggaccaccgccgggtctcgacatgttggcgcaggaatatatggaaatcgccagaatgaacgaggcgaccagccgataaactgttatcgtggaaagggggtgtttcggattcatcgtcgaatattttatgtaaagatagtacaaataagaacagaaacaagttatgtcctgttttgccgaatcgatctatttgcgacaaagatagtgcaaaccgaggccaaaagcaagtttacttatttttaccgatgtgcagcctattttcaattttttcgtcacagagggtgaatcgagttcctaagaaaagggagctaaaaaagatagtatataggattttttgtagagctaacccctccgtcctacggacacctcccctatattttgcgttgcaaaacaccccgtaatgctacgggacacggcagaggagaaatttaaatgagtccctttctgtttgccttcttccagaatccaacgggcgaggagagggtataatctttttatttcaataatttcaatagcgtatgtttgtatatgaacagccggactttatctgccattaccgatacgatgaatactcccaccataaacagcaaggcatacgggaatgatggagtgtaatgcgcttcgatatagtcgcatgctgcacagtataggggtttaatggagaggtcgttatggattaaatatacggcgaacgaggaaactgcgatatagttgatccattttatgctgccgatatttagttttttgaagaacaggaacagggctatggattcgagaacgataagggggttgaggtagctataaggggtaatcgagaatcctgctttcaagatgagggcggcgatggctaccataatgaatccggtaacgaggtaaacacctaaatagacgtatttcgagagatcgaatatgccgtcttgtttccggcggagataggctcctatcaaatatagccccacgaggctgatgatgctcatgcctttgttgaagtcataggcttttcccaagtagccgaacaaggtgctgaacagataaaaggcaagaatgaatatacccaactcccgatgtgttgatttttcgatgaagcggtttatcatcggggccagtatgtacagtccgatgtacgcttcgataaaccagcgggagaatgtattgtgatataatgtcttgaataggtcggtcgcattgaaggaatcggttgcggcggatacgataacagggcatacgatcgcccagaacaatatttgaaaaaggaggttggagaaagattttaatttccaacggataccgaagtacccggagatgagaataaaacaattgacacagacgaagctgatactacgcaattcgagatcgaacagtgtgccgagcgtatcgtgagccaatgtgtcgtgtgtcggtagtgttcgggaaggaatataatgaatcatcagaaccaagaacatcgaaagtattctcagaagttcgatatttgaactacgctcttgtgtctctctttctattttattcgtataattgagcatatttataagggttaataatcgatttgccgtcacatcgaaatatcggaaatgcggcgcttcgatcggggcatgaacctcgggttataaccgaagtacaaaaataatattaaatcttgaaaaagatataaccgttttctttttcatgtttctttgggggattgtgctttatcgaggtaaaaaagctaataataaataaatcgaataattttgggcttctgtgaaaaaataatatatctttgcaccttgataaaaatacgaaattcattaaacaaaaaataaagtaatagtcacatgcaaaacaaaggatttattagagtcgttgcggttttgcttacacttatctgtttgttctatctttcgttttcggttgtaaccgctatttacaataataaggcgaaagagtatgctgcgggcgatgaggctaagtataaacattatatcgactctatctctacggaaaaggtgtattggtggtattacacgtatcagcaatgccgtgaaatggaaataggtttgggtcttgacctgaaaggaggtatgaacgtaacgctgcaaatttctgtggcagacgtgctcaaatctttgtcgaataataacccggatcctaacttcaacgcagctatcgctgccgctcaggctgctcaggccgggaacaacgactttatcgtttcgttctacaacgaatacaaaaagatagatccgaatgtgagactttcggctattttcagcactttccagttaaaagataaaataacccccagatcgactaacgacgaggtgatttctattcttcgcaacgaattgaatagtgcggtggataactcgtacaacgtattgcgtactcgtatcgaccgtttcggtgtggttgctcccaatattcaaaaattggaaaaggacggtcttattcttgtcgagctgccgggtatcaaagaacccgagcgtgtgagaaaattgttgcagggtagcgctaacctcgaattttgggagacgtataaactggaacaacttgctccgaaactcgatgccgtaaataacgctatcgctgcggccaatgctgcgcaagagccggcagaggaagaagctccggtcgttgccgaggctacgcccgataccgcagccgttgcagctgacagcacggcttcgtcgttgaagaaaaaattacagcaggaggcatcggaagccgaaactatggagcgtatccgtaaacagaatccgttgctttcgttaatgaattatacccaaagctacggaggatctccggttatcggtattgtcaataagaacgatacggcagcggtgaatgctatgttggcaagcaaaatcgcccgcgatattcttccgagcgacttgattttacgctggacagtaaaagccatcgatgaaaaggaaaccttgtatcaacttattgcgttgaaagccggtaaaggcggtaaggctcctttgggtggtgatgtaataatcgatgctcgtgacgacttcgataagatacagggttctgtggtgagcatgaccatgaatgccgaaggagccaaagtttgggaaaaacttactcgtgacaatatcggcaatgcgattgctatcgtgttggataatcaggtatattctttccccaatgtgaatggcgccatctctggtggtagttcgcagattaccggaggattctctcccgaagaggctaaggacttggccaacgtgttgaaatcgggtaagatggctgctgccgtgacaattgtacaagaggacgtcatcggtccttcgctgggacaagaggctatccaaaacggtttgatttcgttcttggtggctttggtgttgttgatggcctatctgatcataatgtacgggtggactccgggtcttatcgccagtttcggtgttatatgtaacttgtttttcacgatgggtattttggcatcgttacaggcggtgcttacgctttcgggtattgccggtatcgtgttgtctttggcgatggcggttgatgccaacgtgcttatcttcgagcgtaccaaagaagagttgcgctccggtaagagcatgaagtcggcggttgccgatggttacaagaacgctttctcggcgatcttcgactcgaacttgacttctatgattacgggtgtaatcctgttgatctatggaaccggtcctatcttgggttttgccacgactttgattatcggtatcgctacctcgttctttactgccatctttattacccgtctcattttcgaggccggtttgaatcacggacgattcaataatatgacttttactacgtctatttcgcgtaacttccttacggatactcatattaatttcgtgggcttgcgcaagacgggttatatatgcatattagctatcgttgctgtatttgtcatctcgttcctcacgcgtggaatgaatcaaggtgttgatttttcgggaggtcgcaattttgtggttcgcttcgaacaaccggtaagtccgcttgaaatcgagaatatgctcgaaccttcgttcgagggaagttcgttgtcggtaatcaccattacgaccgataatcaagtgcgtatttctactaactaccgtatcgaggatacaggcgaaggtgttgacaaagagatagagaagaaactttatgacggtatgcaaagtctgttgggcggtgtttcgttggaggaattcagcgacaacatgattcaaagtcgccagaaggtaggtcctactattgcagacgatattaaagtgggtgcatattgggctgtcttcttctcgttgattgcgatggctttgtatatcttgcttcgtttccgtaacattgcgttcagtgtgggtacgctggcttcggtagcctttaccactttctcggtagtaggcttgtattcgttgctctatggcgttctgcccttctcgatggaaatagaccagaatttcgtggctgcggtattgacggttatcggttactctgtgaacgatacggtggtgatcttcgaccgtatccgcgaagagaaaacgctctatcccaaacgtgatttgataacgtcgatcaacagtgcgttgaacagtacgttacctcgtacgatcaacacggggcaaagtactatcatcgtgttgctgtgtattctcttgttgggtgctgagtcggttcgcagtttcgcattcgccatgttgtttggtgtaattatcggtacgttctcgaccttgttcgtggctaccccgattgcttacgaaatccaacggcgtggtatcgctaaaaaggctgccaaagaagccactgcaaaataaaaagataagcgtataaatacaaaaaaggaatccggattcggattcctttttttgtaccctcgccgagaatcgaactcggatttaaagtttaggaaacttccgttctatccattgaactacaagggcatttcggtcgacaaaagtagtataaaattttgtaatagtcaacctttgcagcatattagtcgaatatggctcgtaatatttcgggagaccggagctccgaaatgtcgggttggtgtagccggtagtatgttaaaattcggtcgagtatggcgtttctctctccccgattgaatttgaagtggcgaagattattgaaatccatacgggtgagacgggcgaaaacttcggcttcgcgggcatcgagtgtgtaggtgtgaatggggcgcgagggggagaaaattccgttcaacatgtcgaaagaatatccggtccggtaggtctccatgttggggctgaacccgagaaaactgcataattgcagcaggaaacagagatgaaaattggctttaccttcttccattatattgaggacttgaatggaacgggcgatgaaggcgaaaagcgggagattgggttcgggttcttttatggtttgacagaggacttcggataaaaagagcgcttctgcattttttaccggatcggaatagatgttttgaagaggtaaaaccgtgcgcgcttcgatgattttttgcaattcccggctgttccggtagtctatatcgagttccaaaatagagaacggcatgaagagggaccgaaacatgcgagcttttttcccacccccttgtggaataagataggaagatcggccatattgttcggtgtacaaatgggctaccgatattttgtcgttatagggaatgatgtgcagtactattcctaatgttttttcgagcattctcccggtaaatttttctacaaaaatagttgttttatccaaaggccggtactggttcggtgcattgattttatttattcgggagcagtggttgtatcgggagtgtgaaaattgagcttcacagcaaatattgtacagatacaatgcattatatttgtccatataaaaggctgatgatatggaacagttagatgtattcgattgctcgaatgtgcttatagcgagttattttgccgatgatcgggagtgtgctcatgaaaatcgggaacatacgctcatttatcagtgttccggtagattggagatcgaggaacgtggaaagaaaaccgttttgtatccgggagattgtgcctttatgcggcgtgataaccgaatgtggttgcaaaagagggtcgggaagggtgagccttatcgttccattgtgttgaaattttcgaaggcttttttgagggagttttaccaaacactcgatcggcagcagattccaatcgactccaaacgagagaaagcgagcttgctcctcttgccgaaaaatagaccggatatccgctctttgttcgagtcggttattccgtatttcgatgccggggagaaaccctcggaaaagattttgaaattgaagatgatcgaaggtgtatatgtcttgctcaatactgaccgtaatctgtatgcatcgttattcgattttgtggaaccgtggaaaatcgacattcttgattacctgaacgagaattatatgtgcgatctctcgatgaaagaaatcgccagttatactgggcgtagtttggctacttttaagcgggattttgccaaagtgagcgatttgactcctcagaaatggattatcagacgacgtcttgaagcggcgcatgatttaattcggtcgggaaaaaagaaagttacggaggcttgcttcgatgtaggctttaaaaatctgtcgcatttttccaaagtgtataaagagacctatggggtcgcaccatcgtggcagagtgagctttatggcaaatagatttgagctttatagcaaaatcgttgcgagatatgtttcgtacctttgtacatcgtgcggaaatagacgatgatcgatggagactgatgtctgtctgtttccgatttcccatttgcctgatttctatatgatgggttggagaactggtattttgtagtgttcaattaaaatcatagggtatgaaaacaaaagtagttttatgggttttattgtcaattttaatatttccgattatgacaaaatcacaagagaaagtccgacagacagccggacatgatgcgcttggtgagttcgctcccgagtttgcgcatttgaatgacgatattctttttggagaggtatggagtcgtagcgatttgctttcgcttcgtgaccgctctatcgtgactgtcgttgctctcatgtcacaggggttgacagattcttcgttcaagtatcatcttgaatcggccaagaagaacggggtgaccaaaactgaaatcgctgaaattcttactcatgctgcgttctatgctggttggcccaaagcatgggcggcatttcgtatggccaaagaggtgtgggtagactgtgcggatagtactgctgcctgttcgctcgatgcgtatgctcaatccattatttttcctgtcggcaaacctaacgatgcgtacgccaaatatttcatcggtcaaagctatctcgcacctgtcgtgacagaaggtattcccatttcgaacgttactttcgaacccggttgccgtaataattggcacatacacaaggctaccaaaggcggcggtcaaatacttgtgtgcgtgggtggcagaggttattatcaggaatggggaaaagaaccggtggaacttctccccggcgatgcagtttatatctcggccggtgtgaagcattggcacggtgctgctcctgacagttggttctcgcatctcgccatagaggctcccggcgaaaacaagagtaatgagtggctcgaacctgtgagcgaagatgaatattcgggcgttggccgtcatcaacgctaagcctcgaaatagctcgaacaagtttgtctttttctcggcttgcagtttatttcaaaatgaatatagtatgaaacagatagtattgatacttatgagtattctcagttttagttgttcgtcacaaactcaacgacaggcgacagataccaccgaaccggtgagtaagaaaattcttgtggcctatttttcttgtaccggaactaccggaagggtggcagagtccattgccggtgcggtcgatggccggctttaccggattactcctgccgaggcctatacttcggccgatctcgattggaatgacaagtcgagccggagttcggtcgaaatggccgacgaggattctcgccccgaactgggtggggagcctctcgatatgaaagattacgatatcgtatttctcggctatcctatttggtgggacttgtgtccgcgtccggtcaatacgtttcttgaaaaatacgatttttccggtaaaaccgttatcccgttcgctacttccggaggaagttcgatagcccatagtgtaaaacagctcaggaaactttatccaaacgtgacttggaacgacggcaagttactcaacggaggcgttgcggtggctaccgaatgggctaagcaggtcgttgaaaatgctaaaaaggtaagtcggtgaaagccgttatctcgaagaatcgagctttatgacaaagagttttgagccctgtggcaaagttgccacggggctttctttttaactttgtaacgaatataaaacggattattatgaatgctcatactatttttgaaagagatctgaacggagagatggtctccccgtcggatccgggatacgatgaattgataaatgccatttgggatactatgaaaatggcgaccgaattgaataccagttatcatacacccgatgaggttcgtcggatattgagtgtaattctcgggtgtgaagtggacgaatctattactttgttgcctccgttttatgtggattatgggaaacacataaaaatagggaagggttgctttattcaacagtgttgtacgtttttcgggcgagggggtattactctcggtgaaaatgtctttttggggccgaaagtgaatattattaccattaaccatgatcccgacccgaaaaaccgggatgcgacttatggtcgccctgttgtccttgaagatagagtttgggtcggaatcaatgctacgattctccccggagtgagaataggatacggggctatcgtgggggcgaatagtgtggtgaccaaagatgtgccgcctatgacagttgtcgcaagtaatcctgctcggattataaaagagttgaaaaaataatcgatatgaaagagataaataaaatggaaatcggtcgtcgtggatttcttaaaacggcgatgttagcgggggcagcattgactatgcccgcaggattgaatagggctggccgctaaaacgaaaagggagatcggaggctattataatgcagggtaacagcggcaagtagttttttaatatggggtagagcctataataaaaattactaatgtagatcgtagtagtttttaggggtagtagttcctgttcgagcgggaaagtctgtgcagattgtatgcgatagaaaggtaaatgaaagatttttaggtaaaaattttgtcaattcaaaaaacagctctatatttgcactcgcatttggaaagggcgccttactttatatatctaaggcgcatttttatcaagggcccattcgtctatcggctaggacgcaagattttcattcttgaaagaggagttcgattctcctatgggctacgaatataaaaatataattattaggagactattgagatggcaaatcataaatcgtcggaaaaaagaatcagacaaacacaagtgagaaatttgcgtaaccgttactatgcaaagactgctcgtaatgccgttcgtaaattgcgtgctactactgtgaaggaagaagctgccgctttgtatgtaaaagttagttcgatgttggataagttggctaaaaagaatgtgattcataagaacaaagctgccaacttgaaatcgaaattggctttacacgttaataagttgtaattccttgaaattaaaatcggcaaggttttccttgtcggggataggtatggcccattcgtctatcggctaggacgcaagattttcattcttgaaagaggagttcgattctcctatgggctacgaatgcgacagattttttctgtcgcattttttttgtttagatatgtggtgtctttgtcatgtggtgtcttttttttgatgggaattacctcggtacagtagaaaactcatggggataggcttgaatgttaatgaatgagagggtttggaaagatttcataagtttttttgcggtaaaggttaccccattcgctatgagtatactgtccctctattttcttgcatcttcatcaccaaataaaggtgatgtatttgggagtgaggtttttgtttgtatcaaccccttcgccctgcgggcactccccctatattttgctgcacaaaacacagggggagagggtgaggtgtatatccctttctcctctgccgtatcccgtagcattacgaggtatttctgttttctctatcggagatatttaaaactcctcctctgtgtggcgccagccataggggaagtatcacgtagagaaggagggggcgaaaacgacatctcatcagtctgtttattcagttctcccgttgtgtcgcataacggtatagggggagtgtctgatgggcgagagggctaagttttaaaatcaacccagtggatttattgttttcattccctttcctgttattgattgatgccatttttcaggttcatagtgtatatgatttatatctttttgtgaataaggtgcttgctgtcagatgggtttttgtttttatccttatgtttgaatttgctgtttggattcacaatgtctggtcggggctatgatttgagagaaacgtcggtgtgattatttccacccggattatttcgctattccaacttttttgtgtatttttgtttgttggtggaaagccggccgtttgagccggattttaagtgtttcctgttgattttctgttaataagaatagcgcagggatagctcataaaaacaaaaaagattcggataatatgtcagaagaaacagaaaacaaaagttattcagccgatagtattcaggtgctcgaaggtttagaggccgttcgtaaacgccctgccatgtatatcggcgatatcggtgtaaaagggttgcatcacttggtgtatgaggttgtcgataactctatcgacgaagctcttgccggatatgccactcatatcgaggtatatatcaacgaagataattctatcagggttgtcgataacggtcgcggtattcctgtcgatatgcacgagaaagagcataaatcggctcttgaagtggttttgacggtattgcatgccggtggtaaattcgataaagggtcttataaagtttccggtggtttgcacggtgtgggtgtatcgtgcgtaaatgctctctcgacttatttacgtgccgagattcgcaggaacggaaagatttatatgcaagagtattcttgtgggaaacctttgcacgatgtggaagttataggagagaccgaagaaacgggaacgacgattatcttccgtccagacaattcgattttttctgttacggtttacgactataatattttggcgaatcgtttgcgcgatttggcttatctgaatgcggggattaccctttcgctgacggataaacggacgactaacgatgccggcgagtatcgtaaagaggtgttctattcaaaagaaggattaaaggagttcgttcgttatatcgactcgaataaggagcatcttatcgacgatgtgattcatatcgctaccgagcgtcagggagtgcctgtggaggtcgctatgacgtacaacacgacgtataacgagaatgtctattcgtatgtgaacaatatcaataccatcgaggggggaactcacttgacgggtttccgtcggggattgacccgtactttgaagaagtatgccgaggattccaagatgcttgaaaaagtgaaagtggaaatcagcagcgatgacttccgagaggggcttacagccgttatttcggtgaaagtgatggagccacaattcgagggacagaccaaaaccaaattgggcaacagcgaggttatcggggctgtggacacggctgtgagcgaggctttggcaaattatttggaagaacatccggctcaggcgaaagcaattgtcgagaaggtgattatcgccgccacagcgcgtcatgcagctcgcaaggctcgtgagatggttcaacgtaagtctcctctttcgggtggaggattgcccggtaaattggcggattgctcttcgcgtaaccctgaggattgcgagatattccttgtcgaaggggattcggcaggaggttctgccaaacaaggtcgtgaccgtatgttccaagctattctaccgttgcgcggtaagatattgaatgtggaaaaagcgatggatcacaaggttttcgaaagtcaggaaatcagtaatatgttcaaggctttgggtgtgactatcgggacggaagaagattcgaaagaggcgaatatcgagaaattgcgctatcataaaatcattattatgaccgatgccgatgtggacggggcgcacattgccacgttgttgttgacattctttttccgtcgtatgcgtccgttgttggaacagggatatgtttatttggcgacgccccctttgtacaaatgtaagagtaagcggggtaaagccgaggaatattgctggaccgatcaacaaaaggatcagttctgtttgaaatattgcgagggaaacgaacagttgatggagactcaacgatacaaaggtttgggcgagatgaacccgcaccagttgtgggagacgacgatggatcccgagaaccggattctcaaacaggtgaccatcgacaatgctgccgaggccgatcgcgtattctcgatgttgatgggcgaagatgtaggtccgcgtcgcgagtttatagaatctaatgcgacttatgccaatatcgacgcttaattcgatgcgatataggtcagcccgatttcgtatcgggctgattctgttttaaatagaaggatttgaaaatggtatcgataggggaatgtttttccctgtcggtttatcgatggatagggattcgttatggaacggaaagcgttgaatagcttagggtatatggagctggcggcattttttgtcttcggtacatttttgttgggactgtattacgacattgtgtggttgcaatgggttacagctattttgtttattttgcctatggcgggagtattgcgctatccttcccgttgtaaagagaggcaggagccatttgtcaaagctcgtttcgcttggtcgttgataactatgtttctttatttgggtatgggattcggattgcttacgattctctgaattcgtgattgcgatctggtcggttgtgtcttttttgttctcgtgaatattttcgaaaccgctttctgttgcggcatgggaaattcgattttcttcttgaatcttagaagctgttttataaatttattgagaaataatattatcatttcaagcaggtatgttccggccatattgagctcctgtctcgcatcttgaaccccttgatttttgtcaatagcccgctattgactgcatatctcggactccaatctgcttcaacataggtctcaatctgtctcggaataaatttaaaacagcttcttaattttgttcttcttttttccacaggaaatcgagccagccttttttcttttcataagttcctcgtgtgccgtgtagctctacgaacgtaagttcgggagaagcaggagcatagctgtcggggaagagtaatatgaaatttttatctgtgtaataggcattgatttgatgcgggacatgttcgagcgaaggccggaaagaaacagagccgtgtcgggccatgatgattaccatgaggtcgtcgagttgcaattctgttgatagacgctttaattcgttgcctccgtcggtttcctgcatttcgtataatacgctggtatgatagcgttgcagataggcttgtattagagacagggttttggcgtggccgtgatagaaaatccgccggcctgtattctctcccattcgggcgatgcgttctgtccaccggtaaaatccagcttcatattctgcattttccgggatagcgacatgaatgttgtgcactctgtttatcggcgtgacggcatggagaatcatgatttggcgatccattttgttcagtagattgagcagtacggggccgaagaacgattcgtcttgtgtggctcgtatgtgtagtccgacgataatctcggaggcatcgttttctttcgaagcatgaagtattccgtttgataagttagtcgccaaccggttttgagtttgtagcgttacgtctgcttttgccgcgacttcttgtgcttgcagtaaaagttttttcccttgttcgcggtctgcttcactgcaattatcatacattacgtgtaacccgaccagcccgtgtatctttttagggttgctgacgagtaaggccaagtagatgaggtttttaacgtttttctgattactgaatgaaatgagtattttttcgttgtccgtacccgattgcgtatcgtcgggcggcaattcgctcaaagccatttttcgggcagcaatgtcggtcgttatcgaactgatgatgcatgtaatgagaataagcacgatcgtaccgttgaggacgtcgtcgttgagcagacggctaccgtccggtaaaacgatgttgtatcctacaagaacggctgcgagagttgccgctgcctgagcattacttagtccgaacatcagttgccgttcgattttcttcatgccgtagattttctgggtggtccatgctgcaatccatttggtactaagggccatgagggtcattacggcggctactttcatagattctatatggccgaaaaatactcgtacatcgattagcatacctacgccgatgaggaaatagggaatgaatagggcgttaccgacaaattcgaggtaattccttaaaggagagaccgggggaatgaggcggttcaataccagtcccgcaaagaatgctccaagtatgccttccattccgaccagttccattaaaccggcagcgaggaaaaccattgccagaatgaagatgaattgcacgataccgtcttcgtatttccgtaaaaaccaacgtccgatgcggggaaaggagtagatgatgaaaagtcccatcagagagactttaagaattaattccaaccaagaccaactgcctacactgtcggttctgtacatgcttccgacgatggcgagaaccaatagggtgagactgtcggtaatggcagtggcccctacggctatgctgacgcatctgtgccgggagactccgtatcgggtaacgatgggataggaaatgagtgtgtgcgaggcgtacatactcgccagcaagatggaagagacaatcccatatttcaagatgagtatgttgctgaaaaagcccaagacgataggaatgataaaggcgagtatcccaaatacgatggctttgccccgtatagccggaaaatcttccatgttcatttccaagccggctaagaacatgatgtagtagagtcccacctgtccgaacaattcgaaactgctgtcgcgggccaagatatcgaatccatgctcaccgatgagaataccggccagaatcataccgatgagatgaggtattttcagtttattcaacaatacgggggcgaataaaatgatacagagcacgagaaagaatatccacgtggggttggttatcggtagatgttccctaaggtcgagtagggcagtcatggatttcactttatttgttttgcaaagatagtacaggccgaaagtaaaagcaaatccggttgattgtaccgaggcgtatctattttcgttttatacaaaaatagtgaatttattgttttcagaatttaaatttaccgaagtaacgataaaaatttttttcaggagataatccgtctccgttccatgagaacatcgatgaaagagtagcgaccggttgctaaaagatgtattgaatgcctaccagatagccgataaacagttgttgcagccgattgtcggtgtgctttttccacaagttgttctgcggaaatagcgtttggttgtccatctcggtggttgtcgaataattgagactcgctccgccgaatatgttatagtgcttttttattttgaacgaaggtagcaaggaataacttgcgtttaaaaagggtttatcggaggttgccgtggaagttactttaaattcattgtttatctgaaaccaagagtaacaaggtatgtgtacaccgtatccagcttccgcaacggtcttgttgtcgctgggtaatttgtggttatatccgaaaccgataataccgtatgtgtatttccctcctgagcggaacgagacgataccgttacccaatatgtcataagtgagggctatgcccatctctccgcgcttgactatattgacgagcccaatggggcaatcgctttcttcggcgatattaagaagtccggcgaattgtactcctcggactttcccggcgatattaaggagccctgcgaattgcaggccggttatatctttcgaggtattgagtaatccggcaaattgtacacctttgtaagttcctttggtaatattggtcattccggcgaaggcgacaccttgtccctgtttgcctatataattggatatgccggcaaactgtaatccccgggcttcattggctatgacattactgatcgaggcaaatgtaaaattcctttcgttagcagacatacctgccaatatactgaaagaggctccgttggtgtattgcgatgcatttattccattggagcttagtggtggtatgaaactgaaatggaaagggacgtatttcccttgattcatttgggcggacaggtggaaaacggttaagagaatgataaaaacagattggatttttttcattttcgtaatctttggaatttttgtatcgacttgtgtaacggtaattcccgaagcgggcacaaagttataaaaaattttaatggtgtaaacgagtcgtcacgggttcgttttaatctgttatattattaaaatttttataaaccgcttcaaatacatcgttgaaaaaatttgaaacagctttatgaataaaatttgtttctgtctttatttccgttatctttgttatactaaaatgcgggtagggtacgcttggtattcgtcgggagaagttcgatgtttttaccgtttactccgttttccgtatcattaagaacaatgttaaaacccctatatcatgaaacaaggaaaaaggaaaggttcaaagagaatcaagaaagaagatatgttggcctcggtggtcgaattcttcaaccaggacaggaagcgggcgtttaattacaaacaggtcgcacatggggttggagctactactacacctcaaaaacagatggtattccagttgctcgaaggcatggcggagcagaattttctgatagaagtttctccgggcaaatacaaggcaaacagtcggggaacggaggttataggtcggttcgaacggcgtgtcaatgggaaaaatcatgtgattaccgatgacgatgagtcgatattcatcgccgagcgtaatgccatgcatgcgatggacggcgaccgggtgagggtattggtctatgccaagcgtagagggcacgatgccgaaggcgaggtggtcgagattgttgaaaagactccccaaatatttgtcggaacgttggaggtgcagaaacattttgcattcctgctgaccgataacaaggtgttggcaaatgatatatttattccgaaaacggcacttaaaggtggaaaaaccggagataaggctgtcgtgcgtatcaccgaatggcccgatcgggcccgcaatccgtatggagaggtcgtggatatattgggacctgccggagaaaacaatactgaaatacatgccatattggcggaattcggattgccgtatcgttaccccgaagcagtggaaaaagcggctaataagattcctgacgcgataaccgacgaggagattgccgcacgggaagatttcaggcaggtaacgacatttaccatagacccgaaggatgccaaagatttcgacgatgccctttctattcgccgattatcgaacggaaattgggaggttggcgtgcatatagccgacgtgagttattatgtaaaacccggcagtatcatcgacaaggaggccgaaagccggggaacctcggtttatctggtggatcgtgtcgtgccgatgttgcccgaacgattgtgcaacgaaatctgttcgttgcgtcccgacgaggataaacttacgttctcttgtgttttcgagctgaacggtaatgccgaggttcagaagtcgcatatcgctcgtacggtgattcggtctaatcgccggtttgcttatgaggaggcgcaagaggtgatagagaccggagaaggggattataaagaggaaatattggctttgaacgatttggcgcagaagctgcgaaagcgtcgttttgacaatggttctatcaatttcgaccgtcatgaggttaagttcgacatagatgaaagtggcaagccgataggggtttatttcaaggtatctaaggaggcgaacaagctgatcgaagagtttatgcttctggcgaatcgcacggtagcagaatttatcggtaaacccagagacgggaaaaagcccaaagcgtttgtctatcgggtacacgacttgcccgatcccgacaagatggcttcgttcgccgcttttatcacccgattcggttataaaatcaagaccgagggtagcaaagcagacctttcgaagggtattaatagtttgttggccaacgtacaaggaaagccggaagaaaatttggtggagacgatagctatacgagccatggcgaaggcggtctatacgactgtaaatatcggtcactacgggttgtctttcgactattatacccactttacttctcccatacgtcgttatcccgacttaatggtgcatcgattattggagcgttatatggcgggcggacgtagcgtgaatgttcagtcgctcgaagacgaatgtaaacatgcttcggatatggagcagcttgctgccaacgcagagcgggcttctatcaagtataaacaggtagagtttatgggcgaacgtttgggcgaggagtacgacggcgttatttcgggtattaccgaatgggggttgtatgtagaaatcaacgagaataaatgcgagggacttgtgccgatacgtgaccttgaagatgactattacgagttcgatgagaagaattattgtctgatggggcgtcgcaagcaccggatataccgcttgggcgatcctatccgtatcaaggtagctcgcgcgaacttggagcggaaacagctcgatttcgctttggtagagtagtttgtccgatagaagagatcgcatagatatgccccggaaaagcaaacgcttttccggggcatatctattttttaaaaaggttgtaaaaagggagttattcttttttttactcttttttagcgttatctttgcataatgcgaaaatgggctgtgcctcggtataaccaagtgcgcttgtttctactcccggcttgctttatttttgcattatacgaaaaatcagcggtgagagatagatatttatggaagagaatacgaatataaattctgagttcgagtacggctccgatgccattaagacgctcgattggaaggagcatatccgtcgccgccccggtatgtatatcgggaagttgggggacggttctcatgccgatgacggcatttatgtattgttgaaggaggttctcgacaatgctctcgacgagcacatgatgggctttggcaaacagattgtcgtggagatttcgagcgaggtcgtttcggtgagggattatggtcggggtatacctctcgacaaagtgaaagatgtctcttccaagatgaatacgggcggtaagtacgattcgaaggcatttaaaaagtcagtcggtctgaacggtgtcggtatcaaggcggtcaatgctttgtcgtcgagttttttcatacagtcttatcgcgacggaatgagtaactcggtgagttatgcttgcggagaagtggtctcggaaagcggtttgacacctactgacgagccgaacggtacattggttcagttttctcccgatggaacgatttttaaaaattatgcttaccgggaggaattgatagagccgttgcttaaaaactatgtgttcttaaatacgggactgaccattttgttgaacggacgtaaattccattcccgtaatggattggtcgatttgttgaacgaatacatgacaaccgaacctttatatcctatcattcatttgtcgggagcggatatagaggtggttatcacgcacagcaaccagtatggcgaggaatattattcgtttgtgaacgggcaacatacgacgcagggaggaacgcacttgactgctttcagagaagcggctacccgtacgattaaggagttttatgccaagaatttcgaatataccgatattcgtaacggtatggtagcggcaatcagtatcaaggtggaggaacctgtattcgagtcgcaaaccaagaccaagctcggttcgaaagacgtgggacccgatggaccgaccatcgcaaagtttatcggcgatttcttgaaaaaggaattggataattatctgcataaaaacggcgaagtggccgatgtgatgctgaaaaagatattggcatcggaaaaggaacgcaaagcgatagcgggggttacgaagttggcacgggagcgtgcgaagaaagcgaatttgaataaccgcaagttgcgtgattgccgcatacactacaacgataccaaaggcgaccgacaggacgagagctgtattttcattaccgagggggactcggcaagcggttcgattaccaagatccgtaatgtggaaacgcaagcggtcttctctttgcggggtaagccgttgaatacttacggactgacccaaaaggtcgtttatgagaacgaggagttcaacttgctgcaagctgcccttaatatagaggacggtatcgaggggctccggtacaataaggtgattatcgcaaccgatgccgatgtggacggtatgcatatccgcttgctgatgattacttttcttttgcaatttttccccgaccttatcaagaaagggcatgtttatattttacagactccgctgtttcgcgtgaggaataaaaaagaaacacattattgctatacagacgaggaacggctcgccgctatcaagaagtgcggagcaaaccccgaagtgacacgattcaaaggattgggtgagatttcgcccgacgagttccgtcagtttatcggaccggatatgcgtctcgaccgggtatcgctgcgtaaggaggatttggtgaaagatttgctcgaattttatatgggcaagaacaccatggaaagacaaaactttattatacaaaatctggttatagaagatgacaccaatctcgtctaaaaggatagctgtgttcccgggaacattcgacccttttactctcggtcatatgtcgattgtgagcagggggctcgaattgctcgatgaagtggtcatagccataggtatcaatgattcgaaacgcacttatttcaccgtggaacagcggttggaaatgttgagggatttgtttcgggataatcctcggattcgagtcgtttcgtacgacagcctcaccatcgaccttgcgaagcaatggaatgcccggtttattctgcggggtatccggtcggtgaatgacttcgagtatgagaagactatcgccgacgtgaaccggaaattatcgggggtagagacgataattttgtttaccgagccggaattgactcatatcagttctaccattgtgcgggagcttttaaggttcggtcacagtgtcgatgaatttgttcccaaagggttgaaattagtataattttaagttgaagatgaaaagactattttttatcatattcctacccgtgatagcggtgggagccatgtggtcgcaaggccaaagcgaaggaatgcgaaaactcagtttggccgatttcgccataacgaatttgtatgtcgatgaggtagacgagaataagttggtggaggatgccattcggggtatgctcgataaactcgatccgcattcgacctacacgacagccgaggagacccgggagatgaacgagcctttacagggtaatttcagcggagtgggtatccagttcaatatgaataaagatacgttgtatgtgatacagactatcgttggcggaccttcggaaaaggtgggaatattggcgggtgaccgtatcatcgctgtaaacgatacaaccatagccggagtgaagatgaaaaataccgacatcatgaaacggctacgcggggaatcgggtacggtggtgcgagtgaccgtattgcgcaaaggggtgaaggagcctatcgaattcagaatcgtacgcgataaaatacctatttacagtatcgatgcatcttatatggccgataaagaaacgggttatatacgggtgagccgttttgccgtgacgacagacaaggaattttctgatgccattaaggagttgaaaaagaaaggtatgaagaatcttattgtcgacttgcaaggcaacggcggtggattcttgaccagtgctatcgctatggccgacgagtttttggacgacgggcagtcgatcgtttataccgagggtcgtcgttctccacgggacgatgctttcgcttcgaaacgggggcagttccaaaaggggagattagttttgctggtcgatgagagctcggcttcggcaagtgaaatcctttcgggtgcgattcaagattgggaccggggtataatcgtagggcgtcgtaccttcggaaaaggtttggttcagcgtcccataccattccccgacggatcgatgataaggttgactgtcgcccgatattatacgccttccggcaggagtatacagaagccttatgacaaaggtcacgaggcatatgagcgggaattgctagaccggttcaatcatggagagcttatttataccgatagcattcacttcccggattcgttgcaattccaaactttgaagagtaaacgtacggtatatggcggcgggggtattatgcccgatatttttataccgttagacacgacgatttataccgatttccatcgggatttgttggcgaaaggggtattgaatcaatatccggtcaattatctcgacagccatcggaaagagttgacgaataagtataaaaaggtggaccagtttgtcgaagaatttgcggttacggacgatatgctcgctgaattgttgaagatgggagaaaccgaaaaggtgaaatataacgaggagcagtatcggaaatccaaagggttgatagctttgcagataaaggctcttattgcccgggatatgttcgacacggctgcctatttcagagtaatgaatcctcgaaatccctcgttcgtcaaggctatggaaattataaatgacgatttggagtataatcgtttgttgcaacctaagccataaagtagtttgtctatatagataccggggctggataattctagccccggttcttttttatccttatctttttttcccgatcgcccagggaagatatttattcacgaagggaatgaggagatatatgacgagcagggtgagtgcgacgtcgatgtatccggtgaatacttcccgatgtccgaatattttcatgatggctcgttggaaaggagtttgtatgagaatatgtatgcagaggataaagagggtagatgttcctaaggtacgaacaatcgcacatatatggttcttgttgtcgttgaaataggataggacggacatgaaacaaagaaacaggacgatggcttttaggaaaaaataggcaggcagattacagtcgatggcttgtaagccgatgaaagcgacgagggttgtcagtacaatgatgtattttgatgggtagtcgagaatcaagcgagataatttcagaccgaacaagttgccgattatgaaatagggcaaccattgcactgcgttattgaacatgaaaatggtcgggtaagatttgatttcctcgttccagatcatgattactgcggtcaatatgagatatatgattgtccggtatttttccggagtgatcttgttcatgcaccagtatatcagttgcatggcgaacaagcaaaatatgaaccaaagcggaacattgacaaatagataatcgcttttgtttgttatgtcgaatacatcgaagatacacccccagtcgaagttgttgagcgtacggtaatcccaaaggttaaaaatgattcggaacgggtaggataggaggtagaagaaagtgaatgggataatgagcgttttgactttcttttttaggaaagcggggaatggttcttctttgaaaaagaatccggagagaaagaagaaaagtgcatttatgtaggttacattgtaccattgcgggtgtacagtgtgactccatacgacaccgatgatggcgattcctttaataaggtcgatgtaatcgattcgttttgaagaggttggttttacccccccctaattgttaaaacttgtttattcatactattttgttgtttgagataatttcgtgtcctgtttttgtcgttgtctcccgatagcccacgggatatatttctcggtgaaaggtataagaacgtatatgaggagcatagtaagcgcaaggcagattaatccggtgagtaagttcggttttccggtgatggcgcgtgccatcgattgtataggggctaataagagtacatgaatacccatgataaagagtgatgatttcccgaaatatcggactgtcgtccatatcatcgagcaactgttttcgaagcaagacagtagggaaagtattgccaagaatatggtcaatgctttgataaaggcaaggatagagatatcgatcggcaagtattggaacccgatgaacagggcaaaacatgtcggggcgaggagatatttcagagaggacttggaaagaaatcgggctatttgtagtccgaaaaggtttccagcaataaaataggggagacactcgatggcgatattgaacataaacggtgtgtgccaagactcgattgtgccgtaaccagcgtatagggcagctaagattaccaagaaccagcagctgcggtatttattacggggtattactctgttcaggcaccaaaagataatttgcatgacgaataggccgacgagaaaccacagaggtatgttcaccgtgaggtagtcgggtgtattggaaatagaaaagatttccagcaggctatcccatgcgaatccgtgtagggtgcgaaagtgtccgaaatagaaggccattcgggcgagataggagagtatgtaaaagaagaggaacggaataagtatggttcggattttcttttttagaaagggaatgaatggctcgtctttgaaaaagattcccgataagatgaagaaaagcgcgcttatgtgaatgagatcgcaccattgcggatgaaaggtgtgtttccacacgattcccagaatggcgattcctttgaacagatcaatactgtcgattcgtttttgtgcaggcgattttacgcttctcgatttgtcacagttcgtattcaatgtgcgttgatgtttataacgatatgaaggattgaaccgagatattacccttccctcgctttgtttggacgagtataaatgcgattacagtgccgattatggctccgatcagctgcgcttcgacgccccagctcagcagggcgcataccatggctattaggcaacctgctgccaaacagaatgtcgctatcatggaagtgagcagttctatgataatgagtatggccacaataatgagccacaagagccaacttgatataattgtgtccatcgcaatttgaaatcggattgtttttccgaggttatttgtctgttgtttatgtacaaatataatgggaatatcgataaattgaaagggtatcgatattttttataagaaagggagctgtgccgcggcacagctcccttttcctgtatagaggaaattgttatttcaatccccgattgcgaagcagggcatcgggattaggctctgctccacggaattggcgataaagtttcatggggtcttcgctcccgcctttttcgagaatgttttcacggaatgctttggctgtcgcagggtcgaagataccgtgttctttgaatgcgtcgaaagcatcggcatcgagaacttcggcccagatgtagctgtaatatcctgcacagtaatcgttggtgaagatgtgcgagaagtaggtgctacggtagcgataggtgatttcgtcgatgagtccgacggattgcgctacttctttttcgaattggcgcacatcgtattcttcaacttcgtctatttcgtgccaacgcatgtcgaggatagccgcagctaaaaattcggtggtggcgaatccttgattgaatttagaggctgcctccattttggcgattaacgagtcgggaatgacttcgccggtttgataatgtttggcatataatttcaagacttcggggtgcgttgcccagtgttcgttgatttgcgacggtagctctacgaaatcgcgtgcgacactggtcccgcttaccgaggggtagtggcaacgggtgagcatgccgtgcagggcatgtccgaattcgtggaaaagagtttgcacttcgtcgatggtaagcaaagagggagtatcggcggtaggtttggtgaagtttgccacgttgtaaacgatggggcgtacttctttaccgtcttgtacataggcttcacggaagttgtacatccaagctccggcacgtttcccggcacgggggaagtaatcggtatagaatacggccaaatgtttgccgtcggcatctttcacttcgaatgcgcggacatcggggtgatagaccggcatatctttcaattcggtgatagtgattccgtataatttattggcaaccatgaacgcaccttcacgtacgttgtcgaggctgaaatagggtttcagttcgtcttcgttcaaatcgtatttggctttgcgtactttttcggcatagtaccaccaatcccacggggcgagtttgaaaccgccgccttcggcgtcgatgatcttttgcatgtcggctacttcttcttttgcacgaggtatcgcataggtccatacccgattgatgagatcgttgacgttcgcatcggtttttgccatgcgatcgtcgagggcaaagtcggcgtaggtattgaatcccagtaaattggccttctttaaacggaggttgaccattttcgatacgatttctttattgtcgaattcgttgtcgttgtcggctttgttgatataggctttataaacttttttgcgcagattgcggttgtcggcgtattgcaggaatgggatgcggctgggcgcatcgagggtaaatacccatttaccggctttgttgcgagcagccgcttcatcggcagctgccgtgactactgcctcgggcaagcctgcgaggtcggtttcattgtcgataaccagttcaaaagcgtttgattcggctaaggcattgtctccgtattgtatggaaagcatagctaattctttgttaatctcgcgaagcgtggctttatcttcttcggagagaagagctcccgcacgaacaaagtctttgtagtggttttcgagaactttcatctgttcggtgtcgaggttctctttatcccgattctcgtataccgttttaattcgggcgaaaagttctccgttgagcgagatgttgtcgtaatgctcggtcagtttgggcgaaatctctttggcgatggcttggagttcgtcgttcgtttccgcctcggtcaaactgctgaatatcagattgacctgagtcagttgcataccgctgaattcgagcggttcgatggtgtttttgaatgtaggagtctcggggttggcaatgattgcggcaatttcggcatcgtgctgacggatgccttcttcaaaagccggcatgtagtgctcgggttttatttgttcgaacggcggaaccccgaaaggagtgctgaactcgctaagcagcggattctctttttgattgcaagagatcatcataagacaagttaacgatgttactaaaagttttttcatgaggtataatattactgtgttaatgattttcggaattttcccatacaaaccttgtgacaaggggataatgatctgaacttttatgtcgttggcggacaagccatcgggcttccatattgcctttgtataggatatggtcgatgcggaaccagaagcgattggcgtgatatgtgattcccggtcctaatcccaattcgttgtaagcgtcgcgaaaacctatactgtggaactttcggacggaataggacaagggtgagtcgttgaagtcgccgcagacgatgatattaccgggaatgttttgtattttctcggctgttaggtcggcttggcgatttcgaatctcggctgcgttcatgagtttggacaacaagtgtttctttatttcgtccagtcggtcggtattggggtgtgccgtgatttcatgatatagttctttgtcggtttgagtcaatccaatagattccatgtgttggttgacaacggtgactgtatggtcttctatctttacccggtaaatggcgatggcgctcgactcggaatataccgtatcgaacaacaatgtcgccgggtatttcgacaggaaattcataccgtgggtcgtaggaatgcggtagggatacagcgtgtttacactgtctatttgttccccggtgattttcaatcccggattcggagcgatcagacccggactttcctgcaagcaaacgagatcggcattttgcgagaggataaaggaaagggtccggttttgccgggtatctgttccttcataatcgaggaagaagtaggcattataagtcatcagggaaaaaccgggttggctgttgtctatcggctgaggtttatgtaccggacagtatcgggctattcctccccaagagatgaccagtgcggcgagcggaacccatatataacggggattataggcgagccatataaaaaagaacgctatgcaggcaaacagattcagcggaaataagagttcgaccagtatgcctatgcgggagggaaagtatgccgagtaggagccgatgacgagcaaaagcccccatagcagattgagcagcaataatatgactttgacgacatgtttcattaccacgttattttttcccggcttcgaacagtcttttcttttcttcggcagagagcgaggtataccccgatttttttattttgtcgagaatcgaatcgatttcgtcgttttctttctttttgcgggctcggtattccatatcggtctcgggccgggaagaggatcggttcgaaggtcgtgacactttgattttcgggcggggtttgaatcccgttacgattttgtcgatgagtttgttgacaggcgccgtcaaatctttccctttttcccatcgcacaataaaccagtaaccgaggagggctcctccgaggtgagcgatgtgccctcctccgttggccgatgtgacactcaataagtcaatgacgatagtaaccagtgcgatgtatttcaaagatatagctccgagaaaaagcaggttgactttgtagtcgggcattcggaatgccgtggctacgacaatggcgattatcgaggcagaggctccgcacatcaatccctctttgccatcgaaatagggaaacaaattgtacgaaagcagatataataaaccaccggctatacctcctaaaagatatagccctaccatttgtttttcactgaacgacatgagaaatatttgcccgaaccaatatagccaaagcatgttgaacagaatgtgccatacatcgtaatggacgaacatgtatgtgagcagagtccacggatgggtgatgaactcatagggtatcgatggcatttcgatgaagggcagtatgacatatccgtcgatattgaacagcatcaaaacgacccatgtgagtctcagtagcagaaagatcgctacgttgatatagatgagtttcagcaatacggagccttgccggaattgctgtttcagtttgtcaataatagaatccgccaccgcctattcctttctttttccaataacgaatcaagaagaagccgaagagcatgccgcctaaatgtgcaaagtgagccacgctgctcatgcttccgctgacaccgaagaataattcgagtaacccgtaaaagatgacaaagtattttgccttgatgggaatgggtatgaatatgatgaacaacggagcattcggaaataacatgccgaaagccaataaaataccgaatgctgcgccagaagctcctacggttataaagttgttgagtagttgggacgtttgttcccaaccgtacaatgctacggtttccgatatggctgaacgtagttcgaagtaccatgccgcttcttgcaccaatgccgctcccattcctgtggtaatgtagtagaatagaaaacgtttccctccccatacggcttcgagagttctaccgaacatgaaaacggagaacatattgaagaaaatatgttctattccgctggtgtcgtgtaaaaacatgtaggtaatcaattgcacgacattgaaatcgtcggctgcaaaatagtgtaaccccagccaatagttcaaatttattccggcaattttaggtagagttaaagctgccagccacacgatgaagttaacgataatcaagttgagtgtcaccggtggtatagatcccaaaaatgacctgttttgcatatattaaatgtacttatcttacaaagtgtaaaccattcattccaagcagagtaaatgtattatactctgattgtgcggacaaaagtaatgatttttcgagtatttagtcaaatatagcttgcttatattataaaatcgaggcttttattatatttttttactttattgtttgcagtatttcattttaatctttacatttgcggtgctgctcttcatggagaattatttacttaactttaaattatacgcgttatgaacaaaactgaacttatcaatgccatggcagaaaaagccggtttgagcaaagttgatgctaaaaaagcattggatgctttcgtagaagctgtttctgaatctcttgttaagggtgacaaagtggcccttatcggtttcggaactttcggtgttactgaaaaagcagctcgtacgggtatcaaccctgcaaccaaacaaaaaatcactatcgctgctaagaaagtggttaaattcaaagccggtgcagaattggcagacaaagtaaaataagcatttattttattatggcatagaaaaggaaaggctgggaaggtctctcctttttttatttatattcctcgacagtcgtttatagctcggtcgataggtagggggaatggatcagtcgataattgatgggtatatcgattccgtaggaaatcagagggtattgtccttttatacctctactccctccatcaaaaattatgtaatcttttcaacccccttgccctgcgggcactccccctctatttccttacagaaacaccccataatgctacggggcacggcagggggagaggttatataaatattccattttttctaacactaatcaaaaatctctaagatattattcttaacccctctcatcgtcgctatcgctcctctgtttctcccctatattttgctgtgcaaaacacaggggagaagtgtgaataccttcgataacgggaacagagtgatgcatctccctctcctccttgccgtgccccgtagcattatggggtgtttccgaataaacatcgggggagagtccagagaacgaaggggttaatacaaacaaaaactttactctcaaatatcccgtttttatcgggtggtgaaagcacaaggaaatagaagggaagtacccgcagggtgaaggggttaaactccacaatcaaagattatgtaatcttttcgacctttctccgaaaagactggaatgaggttgtctgcgaagattttatcgctaaaatccatgtctattccacggattttttactgaatcttagaagctgttttaaatttattccgagacaggggctcaatatggccggaacatacctgcttgcaatgataatattatttctcaataaatttaaaacaacttcttaattatcaaaggtttattttctttttgcggttacggtgagtccaccgttttttataagtgataagctgtctgaaaattttttcgagtcctaatatctcggagtggttgagcatgtcgtgggacagcggttccatgaaagagacgggtgtcggttctgctgtgccgaattgttcgggatagaggactattagattgttgttggcgaaatatttggagaggaaagaaggaatattgtcggcttcggaattgaacgaaaccgatgtggggcgcgcactgacaacgataaataggtcgtcgtcgagtacaacattggcaagaagcagaatatcgtcccagctttccaaaatttcaaattcgtttctgatgttgtatcttccggctcgtaatcgggctttcaaatagggaatggtttcggcgtaagcatagaatatagcacggcaacctatttgtttcgccatgttcgccactcggtctatccaccgggcgaatcctgtttcgtattcagccttgcggggaacggctatgacgatacgggtaaccgtgtttatgggattgacacatttcgaaatgagtatcattttattcgtgcttttcaagagcgattctatttttgcgccgaaaaacgtgtcaacgatatttgctttgtgatgtaatccgagtacgacctccgttatatttttttctttcatggtgtggataatcccgctggttatgttcatgtcgtatcgggcgatcgggattaatttcgtatcggcggaagatgctactttccccgcatattcgagaacggcttgtgagaggaagttgctttttttatcgtcgtcggttacatgcaaagcgtaaagtgcagatttcttttgcggagattttaacaagagggccagattgatcaggttctcgattgtgtcgggattagccacaggaattaatatctgctcgttctgtatgggtgacttgtaactggcgggttcgttattttgtatttcgataactatgcgccgggcggccttttcggtaaccaatgtactgataatgcaggtcactaaaatcatgacgatagtgccgttgagtatttcttcgttgaaaagtcctatgtcgtgaccgatgatgacggccgcgagcgtggcggcggcctgagcgttgctcagtccgaagatgagttgccggtcggatttcgtcatgtggcaggttttttgagtgagccatgctgccaaccatttgcagatggttgccactaccgacatgtttacggcgacgatgatcgtttcggtgcttttgaaaattactctcaaatcgatgagcatgcctacacctatgagaaaatagggtatgaacagggcgttgcctacaaattcgaggcggttcatcaagggggaaacgttggggataaaacggttcagaacaatgcctgcgaaaaatgctcccaagatggcttccagcccgataacttgcgccatataagatgccaggaagacaagggccaagataaatatgaattgcgtgacattatcattgtaggtcttgaaaaaccatcgggtgagccggggataaatgtatagtatggctatgctgtaaattgttatgttcaccgatagtctgagccagaaaaattcggtcaagtcgcctcgtaccataccagaaattacagctaaaataatcaaggctcccaaaactgtgaaaatggttccggcgatagtgatagggacggctcggctacgggatattccatatctgctgataatggggtaggctatcagcgtatgcgaggcgtacatacttgccaatagtatggaagtcattaggttgagatggagggtgtagtaactgatcgcggttcctaaaatcatgggtatgagaaacgtgtatagcccgaatatgatcccgtcttttttgcttttcttgaaatcatacatgtcgatttcgagtcctgccaaaaacatgaggtaaaggattcccacgtttccgaaaatttcaaaactactgtcgcgagccaatagattcagaccgttggggccgatgattacacctgctatgatcagaccgatgatgtgggggacacgtatgcggttgagtaatatcggggcaaacaaaataatgaccagcacgatgaaaaatatcagcaccggattttcgataggtagagtcgcgataccgctcataacccctgtaatttaaatgcgaaacttataaatggtgacaaaaatagagtgacccgagtacgaaagcaaattgatttgtttctgccaaacgtggaatctattttcgctttgtggcaaaattaatgataaaagttatttcttgcaaggattttcgaccttctgttcaaaatgtgttactgatggctaaaatacagcgagaatgatataataatgagcgttttgttatagaatttcataaataattgtatatttgcgccaatttttagtattctggaataataaggattcctaagtagtaattataaaagaaagaaaatgaaagtcgctattgtgggcgccagtggcgctgtcggacaagagttcctaaaagttttggacgagcggaatttcccgattgacgagctgttgttgttcgggtcctctcgcagtgcgggtcgtgagtacaccttccgaggtaaacaaattacggtcaaggaattgaaacacaatgacgatttcaaaggtgtggatatagctttcacatcggcaggtgcaggaatttctaaggaatttgccgaaacgattacccgatacggtgctatcatgatcgataattcgagtgcattccgcatggacgaagatgttcctttggttgttccagaagtgaacggcgacgatgcattcgtgcgtcctcgtgggattatcgcaaatcctaattgtactaccatacaaatggtggttgccctgaatgccatagagtcactttctcatatcaagagagtgcatgtcgcaacttatcaggcggcgagcggagccggtgcatcggcgatggccgagttgagaaaacaatatgaacagatcgttgcgggtgaaactcctacggtagagaaatttttctttcagttggcctataatctgattcctcaggtcgatgttttcaccgacaatttatacacgaaggaggaaatgaaaatgtttcacgaaacccgtaagatcatgcattccgatatagccgtgagcgctacttgcgtgcgagtgccggtgatgagggctcattcggaggctatctggatagaaacagaacgacctgtttctgtgtcagaagctcgtgaagcattcgctcatgcgaaaggtgtagtcttggaagacgatccggagaacagggtgtatcccatgccattgaataaggcaggtaacgatcctgtgtatgtggggcgtgtccggtctgatatttctaatccgaatggcttgtctttctggactgtgagcgatcagattaagaaaggcgccgccttgaatgccgttcagatcgccgagtatttattggagcattcgaagtaacaaagtagagaatagagacttccgtgagttttcggttgtgggctatattcgtactattttttgtttgtgaatatggtttgtgtttcggtataaaacggagcaaacttatttctactttcgtttactattgtgattggtatataatgaagaaggctgtataatttatacagccttcttcatttctgttttttattgattaatcgttcttgtagtctgtggtgagactttctttcccaagatagaaaagttttgctttgacaactgtggcactgcaatcgacaggagcttcccaaagcgtggaggttgcggtcggttcgcttccgtcggtggtgtatcttatttcagcctgcggaatgggagagttggcatatagttttccttcgacaattttaattccgggctgtgccacgcggaaattaaaaccgtcggcagccagacggggcagttcgatttcggctatcttggcgttgtaaatggcccgagccttttcatatagagcctgtttatcgtcgttcgggacaggggaccactcgggataggcattccagccgcgttctaccagaccgaaaattttggggaatacatagtattgtaccatatcgaaactgccgatggtctcggagaaaagttgcgcctgtacgcctttgatgcgtggacgcgattgttctgtgagctgtatcttcccttttccggctgttttgagattgttcttttctcctgccgtattttctcttgccgagcagtaaatgttgtagggtaatatgttgaacgatgtaaactcattgacgtaacctccccatgtgagtcccggttcgtctttgtgcggattataggccaaatcgatgtaaaggttgttgacattgcaaagtattacgtcgtatccttcgttggctacggtgtaaggaacaacatcgcgtttgccgatcgtgctccaacaatatacaccggcgaagcggggagctatgcgggcgttcatttcgggagagtggtgtagagcgacttcttgccagcccgaagttttcactccttttttcgacagcatttccgtgatgttttccaagaagtattccgatagctcgtgggtatctttcatgcctttttcctccatgaatttgtggcagagcggggaacctgtccaagaccctttgggtacttcgtctcctccgatgtgaatcgttgccaaaggtacaccggcatctttgtacattttaatgatttcgtcgctgactttatccatgaaacgatagacggagggcaaggctacattcataatattgtcggtataggcttgtgccgatacatatttcgatgtgtcggccgattcggaaaggagatattcccgggctttttccatgtcttctcctttcaatcggttgaatcgagcttccatcgctttgatagccgcgcgtgcatgtcccggcgattctatttcgggtatgacggtgatgtgtcgttttgcagcgtattgcagtacctcgatgaaatcttctcgggtataatatccgtttgccgtggctgtggtatcgtttggattccagcctccgtaatatacgggatacaggcgttggctttcgtcttcggtgaatcctcggcgagaccctattgcagtgagttcttccaatccggggatttctaatctccaagcctcgtcgtcgctaaaatggaaatgaagcacgtttattttataagcggcgagttggtttatcagtttaagcaagtcggcttttttcgtgaaatttcgtgcgatgtcgagcatcataccccgatataacaagtcgggataatcattgatcgctatattttcgaatttagcgggaatagtctgttttttgagtaatgagacgagggtttgagtcccgttgaaaatagcgtgtggggttccgccactgatggttatgtaattgtcttttacgtcgagacggtagtgctcgtcgtttttggcttgcatgttttgggggaaatggcacagggctataacggtctgacctttgtctgtgacgttgtatcccatttcttttagattttgaatcagtagtttcgcttcgtcggcaaaaccatcttcgacactcaaagatatatctttggatattatacttgtgccttctctcggagttacttctttcagggaaggcagcatgtcgtaggtttgtatcttatatgtggtttcgagggcttgattgtcggcgtatactttttccccgtcgggataagatggagctattctcccctgaaccgtccattgttctttgcgatcgaacggtgcgatagagagcgggatagagatttgtgtaccattgttcgtgacaaaaaatggcgatttgggagtgaataaagtttgagtaaaaataccttgattcaaatagcttattttaatcgagtcgccgggagccaatggagtccatgattctgatggcgctattttgtaataaccggcatttatcatctctatgattacgggggaatcttcgtttacttttacttgtctgggagagagctgagtgtaatatatttcccaatctgattccaatggtttagttgaagtgttggtaatcgtaaacgagctttcgtaaaatccgggagctgctccgttttttaccatttcccattgcagggagaccggactttcctttgtgttgttgcaagcacaaagtgcagtgacagtcgatacgataagtaaatgtttcaaatgtttcattttcatggtgagttatttagtgtgaataatcattagtcgtttgtatttaccaaccggaagtcgaacctccgccgcctgtggctccgcccccgaagcctccaccgaatccgcctccgaaacctccgcctctacgaccacttccgacaactgcggcggctacgataatgggtatgatatactgtttacagtctgttttgtgacagtgagcgcaatgatatcttttttctcccaatccggtactgaccgtcgtagctctgcgtagaatgtggtcgccttcgaaactgtaagcccggctgtggcagtacgggcatttctggtattgagtaaattggttttcataaggatataccaatgtattcccgcaatggtcgcagagccatacgtcgtaatctaccgagttcagccgttcttccgtgttttcttgcggtgtgaggtatcggttgtcttcttcttcgtcgagctttctcattttgtttccgcaagattcacaattgcgaggcttgttgcgaagacgcttcaaccgtcgtccgagccctccgtaaaggagaagtacgaagaatgggaacaaaaagctgccggctaagagatacgggcgaaatccggccagccgtttgtatcgctcgtaggcgtctttttttgcataatgagcgatgttccaaagcatagcaaataacaaaatgtgagatacgacgagggaaaccgtgaggtatataccgatgattctctcccagtcgattcctttttttaccggtgcggcggcaagttcttttacggcctcgggagttgttaaaattcgggtaatgacattcattccgtcgaggattcctttatcatagtctccttgtttgaattgtggtataacgtattgcgtttgtatgcgtttacaaatagcatcgggtaatattccttctataccataccctgtgcggaatgtaattctgcgttggtcgagtatcaacaaaaccagcagtccgttgtcgttttgttttcctattccccatcgggtaaaaagttccgtggcgaagtcgtctatgtcgtcgtccccaatggactgtaaggcgacgactgcaacttcggaagtgttggcttcttgtagggagaatagcatttggtcgagggtgtttactgtctcggccgataaaataccgtctggattgcttacgaaacgtctcccgtcatcgaggtgcacattggggactttatcgaccgtgtattcagttgcccgtatgagcgggcagacgagtagcaataaggagattatagcgatttttttcataattcatatttagagagacggcaaactcatgccgttgatttttcgatagaggtcgagggcgtagacatcggtcatacccgatatataatcgatgacggcctgaactttaccgtatagcgtggtggaatgtacttcgtattgttcgggtactttgttcagcaatagtctcgaataggctttgtcggggaatcgtacggcatccaagaatttgtcaagcagaacggaaatgatgcgattacctgctaactcgatatccagaacatcggacgatttgtaaattttcgtccatgcggtgtcggcgcaattttggtaggccgtccggggcctttcggaaatgtggtccaccaaagctcctttgaatcttccctctaacagcgcttgttcttcccggcaaaacagcgtggaacattcgtctatgagcgtgccgatgacacatgaccgcagataaacgatttgctcgttgaggtcgctcactatttccaaaacttcgttgatgtgtttctttctgtcgtcatcgaaaaagtcgaggaatagtttcttgacggtttcggttgtcaggattttcagtttatgggcatcctcgatgtccatgatttggtaacagatgtcgtcggcagcttcgaccaaatagactaacgggtggcgatggtatcgttcgccgctgtcgccgtccggcagtaatcccaagtctcgggcgatacgcaggaagtcttgtttctcggaggtgaaaaatcccgattttcctttttttgtcgattgtatggaggagtagggatatttgactatcgaggccaatgtcgaataggtgagggcgaatcctccgggtctccgaccttgaaattgatgggtgagcaaccggaaagcatttgcattaccttcgaagtgcgtaagatcttgccaatgatattcgtttttcagttcttgttttattatttgtccgtttccctcggaaaaataagttgcgatagctctttcgcccgaatgcccgaaaggcggatttcccaagtcgtgggcaagacatgccgccgaggtgatggctcccaaatggttgagtttgtaacaccacggttcgtttttgtatttttcgctgagcacggccgacacgttgtttcccaatgagcgtcctacgcatgatacttcaaggctgtgggtcagtcggttatggacgaagatgctacccggcagaggaaatacctgtgttttgttctgtaatcgacgaaacggggccgagaaaaccaatcggtcataatcgcgttgaaaatcggtgcgagtatgatgtctgtcgtcatggtattgctccatgccgaaccgtttggaggtgatcagtttctcccagtgcatttgcgcggttttttcttgggcttgtgcgttcataagggttttatcgtcaatctttgcaaaaatagcgaaagtaggataaaacaagttatttgtttttcataccgaatctctgctatttcacattttatgcaaatatagtgaaaacctcacccgatttacagatgtattgaattaaaatataaaaaataggctgcttttttgataggatttcgttattttcgcaaattaaaagaataaaaataagagttctctattaaaacatgctcagatgaaagtttccgtcaagatagtcaataagtcgcatcatgcgttaccttcttacagtactttgttctcggccggaatggatattcgcgccaatctgtcggagcccgtcacgttagctcctatggagcgccggttgattcctaccgggatttttatcgctttgcccgaaggatacgaggctcagatacgtccgcgcagcgggttggcgttgaagcatggtatcacgataccgaattctccgggaacgatcgatgccgattatcggggagaggtaggtatcatcgtgttgaacgcttcggacaagccgtttaccatcgaggacggcgagcgtatttgccaaatggtggtgaaagagtattgtcgggtagagtggaatgaagtggatagcttggacgagaccgagcgaggagccggcggattcggtcatacaggtgtgaaatagcaacctccgagaaatgatgatggagatgggaatacggaaatatggatttacaagaggattgacgtgcttaatatttgtttttattttgtgcggctgtgcctcgaccaaaggtattgcggataagtcgggggagctttcttcggaggatcgccggaaatttgactatttctatttggaggccgagcgattgaaagctatcggagaaaacgatgccgcattcgatttgatgagtcgggcggccgatttggatacgactagtgccgccgcgcgctttttcttggctccatattatctgagaatggggttttacgagcaggcgaggaaagacttgcgatatgccgctgaaaaatatcccgataattattggtataacgtagtgtatgccaatttctcacagcagagcaaccgtcacgacgaggccatacggatatggacgcggttgctggaacagaatcccgataagcccgaaataaattcggctttggcagaaacttatacggccaaaggcgatatgaggcaggctgtcgcctgttatgatcgaatggagtcatcgatgggtatgatggagccgattacgatagagaagttgaaactttatgagtatatgggcgataaggaggctatggtggccgaggcggagaagttgcaacggacttttccccgaaataccgattatatgagactgttgggcgatatttatttggaggccggaaacgattcggcggctctgtcgatctataataaagctttggatcttgaacccgaaaacggatatatctatttgtcgagagccggatactatgagaaacgaggcgatacgatcgcttataacaacgaaatacgcaatgctctgatgaaccgacgtatcgatgtcgataccaaactaagtattttcagtacgtatatcgtcggcctcatgaagaaaaaacaagagttgaaccgggtcgattccttatttgccgagatgttggaacagtaccctcaggaggaacctgttcatcgtctgttcggtatgtatctgtcgagccgtaaagatttttcccgtgccgaggaacagtatgcgattgctgccgatttggctcctaccaatccggaaaactggttgcaactgataggactgtatctttatcaagagaaatacgccgaggtgatacgagtgggaaagagggctatacaatatgttcccgaccaaaaggatatatatatgtatgtggcggtagccagcgcacagactaaaagttatgacgaggccctctcgatgttggaaacaggcttgaattatgtagaggagaatgatgcgggtacaaagtcgtttttttacgggcagatgggcgatgtgtaccattcggcgggagataaggagaagtcgtatgaaatgtatgagaaagccttgtcttacaatgcatcgaatattccggtgttgaataattacagctattttctcgctatggaggggcgggatttggataaagccgagcgaatgagtgcacaggccgttaaggccgagccggataatgctacttatctggatacgtatgcttggatatttttcaagcagggcaattattctttggcacggatttatttacaaaatgcgttagataagacgaaagagccgagtgcggagttgttcgagcattgcggcgatattttgtttatgctgggcgaagtcgacgaggctgtgacctactggcagaaagctctcgaagcaggtagcgaatcggccgagctgttgcaaaagaaaatcaagaacaagaaatatatcgagaaatgaatcacatacgaatcgcggtctgctcgatcgttctgctgattttggcagggtgtaagggtgggaaggaattgatttcagagcgtcctgtttcacaagaggtgcggaataatttcgagtcgttaatggcctcctatcccgattggaatacgttttctgccaaaggctccgccgatttatctttcggagcgagcggttctttgagtgcatctactcaactgcgtatggttcggggcgaagtgttgcaaatctcggtgagaatcattttgggcatagaagtcgcccggttatatatgacacccgacagtttgtttctggtgaataagatgcagaaacagtatgtagcggcatcgttgcaggagataggggaaaagctgtccagtcccgtttcgttgcagaccgttcaagatgctttgttgggacgcatatttttattgaatagcgcgaacaatgcatatggtatagatgatttcgaggtgatggaatccggttcctcccgttggtcgctttctccgaaaaggcaggacgagagatttggttaccgtttcgatttggacgaaacaaaactgctttctacccaaatgggttcgacgagtgggcacaaagagattgtatgtcattataccgattttattaaacagggacagagcgagaattttcctacgaagatgaaaatcgctttgacggggttgagtgtcccggtttcgttgaatttgagatatgattcctcttcggtttcatggaatggaaaagtcggtgtagagaaacctgctttatcaaaatatacgcgtgtttcggcggcgcagatgttaaagaaattgtcgatatgaaaaggtggttgattatatggtgtttgttgttcggcttttcggctgcggttttttctcaaactctcgaaatggaggatttgcggaagaaccgggagcggactttgaaagagttgaatgagaccaataaaaaactgaataaaacgttgaagagtgccaaaaattctttgaacgaattaaacagtattaccgcagaaatcaggcagcaacggaatcttatctcgaaaatcaatagggaaatcgctgtaatcaatcgcaggcaaagggctgtgaaagatactatttatttgttgcaaaaggacttgacggctaaaaaaaggagttatgccaacgcggtgaaacgcatgggacatcagcggtcggagtatgatgaacttatgtttatattttctgcatcttcattgagccagtcctatcgtcgcgctcgttatctgaaagagtactcggcgtggagaaagcggcaggctgccgagattgcggaacggaaacagcaattggaagtgttgcaaaaacaacttgccaaaagtgtagccgaaaagaatgcggtattgaaggaacggaatgccgaagccgaggtattgaaaaaacaagaaggcagtaaacgaacgttgatcgccggattgaagaagcaagagaaacaactgaaaagggagatagaccggaagcggaaacaggccgaggcgttggatcgcaagttggaacaactgattgccgaggaagagcgtaaatcgtctacccgtgctgacaagaccgagggaaaaaattctactgcacagcagcggcctaccaaaggttataagatgaccaaagaagaattggccttgtcgggcagtttcgagaaaaataaaggaaagctgccgttccctttgtcgggcagttataaaatagtcgcgcatttcgggcggcagaagcacccggagttgcgttatgtgcagaccgaaaatagcggtatcgatatcgagactacgccgggaacaaaggctcgtgctgtattcaacggagtcgtttcccgcattttcgtgacaccgggatacaacagtacgattatcgtgcgtcacggtaattatctgactatctatgccaatttaagcgaggtatatgtacgagccggcgaaaaggtttcgaccggacagaatctgggaaagatttattccgactctcaggacggcaatcgtacgattcttactttccaattgtggaaagaacgtacgaaactgaatccggagctatggctgaatttgtaaaataaaacaagattcgtatgatagaaatacatcggtacactgcggcttatcatagggattggaatgatttcgtatccgaatcgtcgaacggtacgtttttgtttttgcgggagtatatggagtatcatgccgatcgctttacggattattctctcttggtttatgacggtaataaattgttggccttgttaccggcaaaccgttcgggcgatgtgttgtactcgcatgccggactgacttacggcgggttgatcgtgactactcggaatacgacggcgcaggttctcgaaatcatgcggtcgattgccgattttttgaaaaaagaacggtttgtcaaatgggtgtataaatgtattccacacatctatcatcgttatccttctgagtcggacttgtatgctttatttcgattagaggctcgattgatggggcgcaatatatcttcgaccgtgcagttggataatccgatccgattacgtgccgaccggcgcagccgaatgaagaaggccgagcaagccgggttgcgggtagtcgagaccaccgatttctctcctttttggaaagttttagatgctaatttgcaagagcggtttcatgtgaaacctgttcactcgttggacgaaatcgagttgttgcatagtcggtttcccgatcggattcgtcatttcgtgacgatgaggggtgacgagactttggcggggagcgtcatttatgatacaggaatcgtggcgcatgcgcaatatacttctgcttcggcagaagggaaagcatcgggtgctctcgatttgttgtacgcccggcttataggtgaggttttcgccgataggaaatggttcgatttcggtcagtcgacggaagatatggggcactatctgaacgaagggcttatcgctcaaaaagagggattcggcgggcgaggggttgcttatgatatatacgagataacgctatgaccggcggggaggagaaaaaaaatatctatcgcacgattgtgaaggctaccggacttttcggcggtacacaggtatttaccattctctgctcgattatcaaaacgaaattggtcgctatatggttgggagccgagggtgtgggtatcatcgggctgtataataatactgtcgagatgatttcctcgttgacaagattgggaatcggaacgagttccgtgagggatttatccaaagcgtttaaatcgggggacgaaagtcggtttgccgaactggtgtctgtcgtgcgtcgttggatttggttcaccgggttgttgggggcggtggttatgctgactttcgctccgttgttaagccgatatacgtttggtgacgatgcccatatatgggggtacgtttttttgtcgtgtacgttgttgtttacgactcttaccgagggggaacgggcggtgattcaggcatcggaacgtttgcgggttttggcaagatgctctgttttagggtcttttttcgctttattgttctctttacccttgttctattttttcggtatttcgggtattgtccccgccattatcgcacatacattttccatttgggtcgtgactgtttcgttgggtaggaagatgaagataaagccggtgaaaatgagttggaccgagacttaccggcagggaaagaatatcgcttcgttgggtatttatatgacggtaagcgggtttgtcacgaccttgtattcctacctgttcgtcgcatggctcaacgatagaggaggaaccggagaggtaggtttttttcaagcgggttatacgttggtcatgcagtatgtggggttggtttttacggctatgtctatggaatattatccccgtttgtcggctgtctgcgaggataaagtattgttgtcggaacatgtgacccggcaagtggaaacgtcgttgttgatattggctcctgtcatttcgttattcctgatttttcagaatttgattatacatatattatatacatctgcgtttttagccatcagcgggtatatttcgtgggctgtattgggcatgcttttccgggcattttcgtggagcgtgagttttgttctgctggcgaagggagcaggccgtatttttttaataacggaaatcgtagccgattccttgatgttcgtaatgtatcttgtcgggtatacccattgggggttacagggtgtcggggtggcctatttgttggcctatctgttttcgatgacagggatttacatggtttgtcatctgaaatttgggttacatattccggtgcgaatgttcgtttctctttttgtttatagttctttatgttatttcgtttggctgttgtggtcgaacgattgtttggcgggggcttacagcctgaccgcatttatttgtctttttaccggatttcagttgaaaaagaagatattctgtaaatcgaaataattagtgcttctcccaaaattcgagatattgccgggctacttttacgtggtcgtgatatttttctacgaattgtctactttcggtcgatagtctcggtaattgatcccgatgtataatcagattttccagttgtttgaatatatcgtttcggtcgggtaacacgttgataataggccgtagtttttgctcgccgataaaattataaaattcgggttcggctccgcttacggctataatgcctcgtgccatagcagccagcgcattggtggcgggtgtataggaatagagttggtccagaaggatatgacaatctaccagtagtttgttgtattcgtcgaacggtacggaaacgactttttgtatatggctttcgcgggggtatttatcatgaatttctcggagtacgtcgagtaatatgtcggttccttttatcgctgtgcggtgttgttgtattccgatgaagaacttaacgacctccggtgtgctttttatcgggtggaaaggattgatcgacaggtcgatgggtatggggatataggctaacttatcggcatattcgggctggtatgctgcataatattcatatagacaggcaatgataccattggcttcttgggccatttcgatgttgggtcgctcgttgggaccgcctatccatgccgcaagcattttttctcgttcgggatgcgggagcggtcggtctccgacgaagaagtcggagtaacgaaaggttttgccgtccaagcatgcttttacataatagtggtctatggcgagagcatcgaggaatatctttttgttgtgctttttcaggtatttaaaaatagcccaattcttttctggacgtaaatcgaaaaagacaggattagttacttggacaacatcataacctctcatttgcgggagatgtcgtataatatccgccatgtactgtatggaatgaaacagatcatatcctcgacgaacgatactgacatctcgtttgttgttgagccagtggctaccgtgagaaacgactgtcaccgtgtgaccattggctcgaagcccttcggccaatgtccagtgtaagttgctggcttcaccgatcagtaggattttcatgtagagttaagttatagatttgttggtaacatagaatcgttttttgtgcgataagttccgtattcatattttgtcgggcaaattctgcattcttttctccatatcctgtatttgctaattgtcgggcatgagcgacagcttcgatgaccgaatgactgtcggtgaggtcgaaagtaggatttcccgtcaaatcgagaagttcgccgatattcccgaatttgggtcctgcgacgactttatgaaagaaaagagccataggaacattgcccgagttgagaatctctttacgttgaatcagaacgatatctgcggccgagaagtagtaaggaagctcggtattcgatattttctcgtgtagttgtaaagctctattcgtgtcgagccggaatttctttttttgagttcggtatcgcagcagattttgtatgggtgttttacggttggtaaaacaactgttgtagaaaccgggagccaataggaacttatccgacatgggtagatgctcgaaagcatcgacgacaaggcgctgttcttcttcgttgcggtaacttccaaaagtgagaatgatgaatttatcggtcggtagtcccagcttattgcgggaggtcaatttcgaagggaatgcatatccacatgaatcgtatatgtgatgaggtatgacgaaatgccgagccgtgttttcgggatatatacgggcgaactcttgtcggctatattctcccaaatgaataatcgcattgctttgagtttcgacgatacgatatagttccaatttgtttttgtccgtgcaataatgcgggatagcgtcatggcgggtatatacgattttggttcccatgcttttcagtcgagcgattcgttgtcgtagagcttttaacccgttatcggagggttgccgccatttgaaaatgacttcgggaaactgaatgtgaacgatgtcgtattttcggggggaattccaaaaggcatcgatactacattctacggagccattttgtcgtcgtatctcctcgcatagggacttgacgtacaaattgtcgttttgaatgattttgtcgaagtagacgaaaagtatgttcatggctatgcttggacgatgtttcgtatatcgacaaaagtaataaaattttgtagaaatgtcccgacggaaagattgaaatgagtattgtgcagaaatttatcttcaatcgaggaaaattgtcttggtttcgagtgttttcgagattgagaaacagagcttatgtaaagatgccgaagcgaacaatatgaaccttcgaagcattgtataaataggtaacattatttatctggaattacagattgctcgaccgccgttattggttcggctgaatgcggtattcgatagctctacgtttgccggtctatgattagtaatgtattggtggagggtgtgaatgatttgattttgcggaagatatacttcgattcaattttatatgtggcatattttttgcaattatgttatcgttaatttaaaatttggaatatgaacagattatttctttttatgacaatattggtgctgggtgtgccggtatatgctcagtcggaaaaacgtatagatacgaaagagaaacaagagaatgtaaacagtcgtgaactgaaaaaacagttggctgctatccaagattcgattaattataagaatgcggtgagtgctttggaaaaatcgaattttgtattggaagcagatcagttgctgtttaaaaggggcgggactgctttcgtatcgtccaatacgaattttgtttctttgtcggataatagggcgatcgtacaggtggctccgtttaacggtggaggcccgaacggggtgggtggtataactgtggaaggtagtgcttcgaatgtaaaagtacagacggataagaaagggaatacgactctttccatgaatgtcatgggaaccggtatttctgctacggtcaatatctttttattcaaagggagtaactatgcgtctgtggttattagtcccaattataattcgaatcggattactttgaggggacgacttgttcccaaagagtattcaactgttttcaagggttcctcgttttagatttttgttgtagatagatggattctgtatgaaaaacatacatgcgtatgtttttcatacagaatctgtttatatttgcatagatgaaacaagcaggaatagggatagttattcccgtgtataatcgagaacgggagttgcggcggacattcgattctgtcgttgcacagacttatcgccctatccatgtggtattggtcgataacggttccaccgatgggtcgttggctttatgccgggagttaaagggggcatatgagaccgatgattttcggataacggttgtcgaagaggctaaacgaggaccatcggcagcccggaaccgaggtcttgcttgtgtgacggaggagtttgtggcttttctcgatagcgacgacgagtatattcccgagtcagtttcgctgtatatgcaggctttcgagagtaatccatcggcggatattgcggggtgtaccatacgacttataccggaacagggcaaaccttattcggcaaaggcggttttctccaaccgggtggaacctcatttgttccatagtactttgggtacggtacgttatgcggtgcggacgacagtgctgcgtgcagtgggcggttggcctgaggattatatgcgttgggaggattggggtttaggaatcaaattgttactgtttacagaccgaatcgtctgggttcaaacacctccgttggtgaatgtatatctccatgccgacagtattacgggttatcgttatgctcctaatgtccccgatattttaagagcgattgcgcaagctcacgaagatgtggagcgaagcgattctgcgcagaaagcccgtttgcataaattgttgctttataaacaaatggttgtggccggactttgtcgaaaggaaaaaagtccgttgggtactgagatttatcgctcgacgatggagacagcgggtaaagacaggacgatgcgctggttcttaccgatggtttatcgatatgtctcttggggaggtcgaggatcggctatccttgccaaccgattattgcgctgatttctcgatttgaagccgatcgagtaagcaaatgtatacttcaatggcttctcgtatttcttctaatataatgtattcgtcggcggtgtgcgagcgtgacgaatcgcccggacccatttttaccgaggggaatggcatgagggcttgatcggagagggtgggagaaccgaatggttcatatccggcaaagagtgctctgcggacaaacgggtgctgtatggaaattgccgatgaattgagccgtaaggagcgaggtgtgatttccacttcgggaaaacgggatttgagaatctcgacggcttcggcattggtgtagcggtcgttggtgcgtacatcgactacaaaatcgcaacggtcggggataacgttgtgttgtgttcctgcctgaatttgggtgacagtcagttttacttttcccaataaatcggaagcgagcggaaactcgaatgttcgtagggcttcgatcgtttcggtggctttgtacaaggcgttgattccttcgttgcgagcggcgtgtcccgactttccatatgtggaacaatcgagtacaagcaaccctttttcgcagacggcgggctgcatacccgtgggttcgcctaccacggcgaaatcgatagtcggcagttgttccagagccttgacaataccgttttgcccggagacttcttcctcggcggatgccaaaaagacaaggttgtagggctgttcggtttcggaaaggtgaatgaatgcgcttaacaaagagacgacacttgctccggcatcgttgcttcctaagccatatagccggttatcttcttcgatcggaacaaagggcgggcgactccaactgtctgtgggctttaccgtatctatgtgcgagttgaggagaacggtaggtttttctgaatcgaattcgcgggcgaaagtccatacgttattgccggctcgatatggtgtgaatctgtttttttgcaaggtctcacagattatttgcgctgccgcatcttcctcccgactgatggaaggtgtcctgattaaccgatgtagcaaatctatggcagaataatatagttcgtcttttgagttcatttccgatttcgattttcacaaaagtagtttatttttatcggtttcgataatttctgaccggatttattgggggcgatatgggtttgaatattaactgatattaactattcggatttgaatgcttatttgtggggaaaggttgatgtacaaatgatataaagccgaattttgcaatgtcgacttaacaaaatgaaatatatattctacttaaaacttattaaaacgggaatcgtaccgatataatctgtaactttgtcgcagatttatagttatatttatggtaaatcaattgacctcgttggtccgcaggcaggctgcaaaatatggcaaccgtgaggtgttcagccacaaggactattcaaccaatcgatgggtttctacttcttggaaccgtttcgcagagcaagtatcggacatggcgaaagctatggtaatattgggtattcgcgaagaagaaaatatttctacatatacacagaataagccggaaggtcttatcgtggatttcgctgcattcgataaccgtgcggtgacagtgcccctttacccgactagttctttggatcagataaagtatattatcgatgaggcagagatacgattcttgttcgttggcggccaagtgcagtacgacaatgcgattatcgccttgcgggagtgcccgacgttagaaaagctgatacttttcgatcccgatataaaacgagcagagagcgatagctcgtctgtctatttcgaagacctgatagcaatggggaaatcggcggacgagaaagtcagcgaagaagtggagcggcgtagaaatgccggttcgcccgacgatttggctacgttgatttatacctcgggaacgaccggagagcccaaaggagttatgttggcgcattccaattatgacgaggctattcgtatacatcttcaacgtttagtaacctgttcggataaagacgtttcgctttgtttccttccgttgacacatgtattcgagcgggcgtggtcttattattgtttgaccgtgggcatgcgtgtcgctatcaatgtcgatccgaaggatatacagaacacgattcgagagatacggccgactattatgtgcagtgtcccccgtttttgggagaaggtttactcggccatacaggataacctgtctaagatgaaaggtgttgcccgtcgcttggcagagcgggcgttcgtgataggtcgtcggcgcaatgtggaatatttgcgggcggggaaacgtgtaccgctgtggctcgaatgccaatacagattttacgacaagttcgttttctcgaaaattcgtcgggctgtcggggtagaaaacgggaatatctttcctacggcgggagctccgttatccgacacgattaacgagtttctgcatatttgcggtatcaatatcgtttatggttatggcctttccgagacgacagcgacggtgagttgcttcgatttggtgggatatgaattcggaacggtaggctctttaatgcccgatattcaggtgaagttgggtgagaataacgaaatattggtaaaaggaaagaccgtaatgaagggttactaccgtaaacccgaagagacggccagagtctttaccaaggacggttggttccgtacgggcgatgccggcaaggtaaacgaacaaggggcattggtgttgaccgagcgtttgaaagatttgttcaaaacgtccaatgggaaatatatcgctccgcaggcgttggaaacccgtctgggtgaagataagtatatcgaccaagtggcggtgataggagaccaacggaaatatgtgacggctattatcattccggcttatgaggctttgaaagagtatgccgctcagaaacagatacaatatcgaaatttggaagagctggtaaaaaaccagaagatacaggctcttatttcggaacggatagatgcgttgcaaaagaatttcgcccggttcgaacaaatcaagcggttcacgctattgccgcaggctttcagcatggaaaagggcgagttgaccaatacgttgaaaattcgtcggtcggttatcaatttattgtataaagacgagatagaggccatgtatgcttaaaaacgaaatatgaaatttggtaaataggcggagggtgtatatttttgtacacccttttgtcatatcataaggaagcctataaatatgattacacaagaacaattaaaagagacggaagaacgcaagttggcgttgaggaggtatctttgacatcgattcgaagaaaatcgaggtagaagaggaagagttgcgtacccatgtgcccgatttttgggaagaccaaaaaaaggcggaagcgcagatgaagaaagtaaaagccttacatttctggatagacagttataccgaaatagaaaagtcggtagaagaattgaggctggctttcgatttcgtgaaagaaggtatcgtgtcggaagaagaggtggacgagatttacaaacgcactacggagcttatcgagaatctcgaacttcgcaatatgttgcgccgggaagaggataaattgggtgtcgttctgaaaatcaattcgggagccggaggaaccgagtcgcaagactgggcatcgatgttgatgcgtatgtatttgcgatggtgcgaacagcataactataaagcctctatcgccaatatattggagggcgatgaggccggtatcaaatcggtgacgatacaaatcgaaggtgattatgtatacggctatttgaaaagcgagaacggtgtgcaccggttggtgcgggtatcgccgtataatgcgcaaggaaagcgcatgacttcttttgcatcggtattcgtcacgccgttggtcgacgatacgatagaaatcaatatcaatccggcgaatatttcgtgggatacattccgatcgagcggggccgggggacagaatgtgaataaggtggagtcgggcgtgcggttgcgctatcagttcaaagacccttataccggagaggaagaagaaatcttggtcgagaataccgagacacgggatcagcctaaaaaccgggagaatgccatgcgccagttgcgctctattttgtatgagaaagagttgcaacatcgtatggccgaacaagctaaaatcgaggccggcaagaaaaaaatcgagtgggggtcgcaaatacgcagttatgtattcgacgaccgtcgggtgaaagaccaccgtaccaattatcaaacttcggacgtgcagggcgtcatggacggtaagatagacgattttatcaaagcctatttgatggagtttgccggggaagaaaataacggttagactaatggacaaactgacactgataaaagtagggggtaaaatagtggaggagcaggagacgttgagtcgcctgcttgtcgcttttgctgccattcccgagaaaaaggtcttggtacatggtggcggtcggtcggccaccgctatggcctcccgcttggggatagagagccgaatggtaggcggtcgtcgcattacggataaatctatgctcgaagtggtgacaatggtttacggcggtttggtaaacaaaagcattgtagccggattacaggcagtgggtgtgaatgctttgggtatgacgggagccgacatgaatattttgctgtcggacaaacgtctggcaggagaggtcgattacggttatgtaggcgatgtgcgtcatgccgacggcaaagctcttacaggtctaatcgagatgggggtcgttcccgtaatcgctccgcttacccatgacggtaaaggctctatgctaaacaccaatgccgacactatggcgggagaaacagctaaggctttggccccttattacgatgtctcactggtctattgcttcgagaaaaaaggagtgttgcgagatgagaaggacgacgagagtgttatcccggaaatcgatttttctttatttcaagaatatcgggagaaaggaattatacaaggcggcatgatccctaaactcgaaaatgcattcgaggctattcggcacggggtatgcgaggtaatcattactcgtgccgattgtatagggcagaaggatagggggacaaggattgtaggataagcgtttagaatggaactgcttatgtcattggattaattctgagttgatccatctttaagggtaatcattttgcaggaattgggaaacgaatagtcgtctataaataaaatacaagggttattccgaaaggaataacccttgtcgttaaggatagcttatcgtttatttaaatgaagtcccctcggtgaaattttagtatcgatctatccattcccaaccggaaggtgtatattccgatgaaagaataatgattccctcttgatttcggagagattctatgactaagaaatatccgcaatggttctgtattcgagaagaacttttccatgcttgatgtacaaaataaagatgcccgatttgaggataacagtatgattctccttcttgtggaatgtcaatggcattcaggtctatatcttctgtttcccgttttcctaaatcggtaaaggtggttattctgttttcttgtccttcgacttttccgttattccatgagatgataatattcttattgagaaactcgaagggggactggtcgctgatcaatccccttgtccatacggtatcgacgttggttggatattctttctcgcatgaggtgaaagagatgagtaaaagtaaaaagatagagatttgaaatgttaaatgtttcataaaataaaaaggtaaatatccgaccggttccaaaatcggattgtttgaaaatggattgtagacggatataaaaaagacgcggaacctaactttatcgtatctcaaggttctggaataccctattaagcaataaagttaagcccacgtcatgcgacgcaggcgttataactctatatccttgcttaatgtttatagaattttccagattctgagatacaagaataaaagctaacgctcttttatatatgtcttaaaaacgataagttatttacataggctcttgtgttttatttgtttgcgcaaatatacggattttatttcaattgttccgcttgattgtaaatagcttcgaaaatggttttgtcggcctcggttaaagtgcgtccgcggcgagccatcattttctcggcgatagcataaaatttggtgagttgtacgtcggtgaatccggcggttcccccttcgctgaacgaggcgacaaagttacgtggaaatccggctccgtgtatattcacgcctacacctactaccgtcgctgtgttgaacatggtgttgattccggctttggagtgatcgcccatgataagtccgcaaaattgcaggttcgtgcggaggaagcggcgggtaggataattccacaatttaatttcgctgtaatcgtttttgagattggaggatacagctccggcgcccaagttacaccattcgccaataacggcattccctaaaaatccatcgtgggctttattggagaatccgaacatgactacattattcaattctccgcctaccttacaatatggccccaacgtggtcgctccataaattttagtacccatgttgacaacggcgtgttcgcaggcagcgaatggtgcacgaatgcaactgccttccatgatttcgcagtctttccctaagtatatgggaccgtttgtgacgttgaaaattgcacattcggcatgtgctcccggttctaaaaatatcttgggagttccgtctgggaagcagggctcgccgatgatacggttcgaatcgctgagtttctcgctcgttcgtccgtttgtaatgagtcggaaatcggcttccagacattctccgttcatcagaaatatatcataaagatgtcggatacatttcagcgtgtggccgtactctatcgtgcgattgtatcgttcgtttcggaaatcggcttcatttcctcgaaatgcaagcagttcttgattgcagacgatggcttctccgggatccaaatcggatatttgttttaccaatgaatcgtcgggaagaatgtggctcgcgataaaaatgttatcgtccgagagagccgccggatatttggctgccatatattcgggtgtgagataggagtacatgccgggtaaccggtgttcccatttttctcgtatggtaagaattcctattctaatgtccgaaaccggacgggtgaatgccagcggtaaaagatcgaaatgctgttgattaacgtcgaaaagaatgatatttttcataaccaaatgtaatttgatacttcaaaggtaatgtaaatcttagaaataggttcggtttttttaataaatatttcatacagaggggtgtgcagtagagcgaggtggcgaatgaacggcagtttgtgaaatcctttgaacaaatgaggccatatagtcgtttatgagggaaaaagggatatatggagaagaatcgttttgtgcagttggtggccgatatgctgtatcggacggatcgggaatctttgaatttggagactcgttataaaagtctggaagagtggaattatttatttgaggtttctttggctatgatgctcgaagaggaatatcaagtagaggttactcctgaggattttgattgcacgagaacgttgggtgagttgttccatcgggtttgtgaacccagtttggctgataaaaactaaaaaaatcggaggaatagaaaatatgtgcggattagccgggatagtgggagaggtggatttgatggagcaagtattgcttcatatgtctgcggcacaaaatcacagagggaaagagactcctaatagttgggtctcttcttttattgatgctcgggtgggattgatgcataatcgcatgaaaaccatcgatatggccgtggctcctaaacaaccgttcgaagataacgataccggattggtcgttatgttagatggtgaaatatttaattatgaagacgtccggcgccagctcgaaaattattattcttttacgactcgtggaatgtgcgaggtgattacaaaagcgtatgaccgttggggagatggttgtttcgaccggttcgagggatacttttctatcgttatatacaatcgctggtcggaggaattgttgctttgccgagaccggtttggcataaagcccttgtattatgccacccaaaggggtaacttatttttcgcatccgaaatcaaagctttgtttgccggtggaattcgttctttgttgtcggcggaacgatgggcgagttacttggcctattctacttatggcagtccttatgaaactttttgggaaggtgtgcatcagctccctgccggatttttgttgcattataatggttattcgctggtggagaaacgttggtatgagtttgaaaaaagagtctcattgtggagcgaggagtcacccgagcgattgccggaggcttttctggaacagatgtacaggagtgtcggatacagcttgatgggagaaatggagaaaggtttgtcgctaaatggtagtttggagtcggcgttatttatttctctgatgaaggaaataggacttccgaggtcgttgaagagctatatgcattatcgggggaaactgcatcaaagcggagttttgtggagtgccgagatgcttgcggagacacctttgccaatggaacaggtgaaaattaccaaatcgatgttgttgaaggagctcgattatctggcgagatggcaagaggaacctatcgacggtttgaacacaattacctactctgcttttttcagggttatgcacaagcgcggactttcggtgcttagtggcggatggggacttaatcattttttaggcggggtttcgttgccgggtgacagttctacatcattggtcccttcggaggttctgtcggccgatttcaggcgattggcgcggaaacccgaatatcgacgttcgtttgtttcggaaaatgaaaatttacggttttgcgatttgtgttacgaacgtataccgcatttgttgagaagtgtcgataaaatgagtatgtattacggggttcaaatcaggaatgcttttttaaatcacaacttgatcgaaatcgcttttgcattggccgatggaagttcgggtaagcatcgaaaggcttggttttcggataaaatcgtgatgcctttacttcctgaaaaaataaggcttgctcccaaaaatgaggtagagggactttatgatattcccacggaattaaaaggctgggccgatgaagtggtgcatgatttgcgattcgggcaagtttcggaatggtttgattatccccggttggaaagagcgtgggagaatcctgaaagcggagttttctccgatccggtaaaggcctggaagttgttgtctctgtgtttacagttgaaaagtttgacttgaattgatcgtgctcatgtagcggttctgataaattttatcttttgttgtaaaacttttgcgtttagaggagattgtatttgtttctcctctcggcttgcgctatctttgtcttccaaaatatatttcgatgaaatttacagaacagaagttaaagggggtttttgtcatagaaccgcaggtgtttggcgatagccggggatattttatggaaagttataagaaggaacttttcgagaagtatataggggttgtcgattttattcaagacaacgagtcgcggtcgagttatggcgtagtgagggggctccatttccaaaggggtgaatggtcacagtccaaattggtgagagtgacacaggggcgtgtctatgacgtggttgttgatttgcgtcgtacgtcccctacgttcgggcagtatgtagggatagagctgtccgatgaaaataaaaagcaactttttgttcccagagggtttgctcacggttttgctgtattgagtgaaactgcccaattctgttacaaggtagataatgtatatgctcctcatgaggaagtgacattgttttataacgatcctcatgtggccgtgcaatggcctataaaggccgaggaaatgttgctctcggaaaaagataagaagggactcggatttgaggaaatcgaggttttcgaataaaacgaaaattttatattcgtttttttaatgtttatggcataaagagaaaaagctgaaaaataatcccaatatgtttggtttttaatgatttagtctttatctttgcaccacttttgatgccgtagaaggtcgatatttttatataatcgcttgattatgtgaaagtaatggctggttttggtgtcgtggataaagagaaaaataagaagagttataagtaaaagattttttaaaaaaaagttctaagaaatgcctacaattcaacaattagtaagaaaaggacgggttgtattggaagacaagagtaaatctcccgcattggattcatgtcctcaaagacgtggcgtgtgtgtgagagtttacacgacgactcctaaaaaacctaactctgccatgcgtaaagtagctcgtgtgcgcttaaccaacgggaaagaggtgaactcttatataccgggtgaaggtcacaatttgcaagagcactctattgtacttgtccgtggcggtcgtgtgaaagaccttcccggtgtgcgttatcacatcgttcgtggtacattggataccgcaggagtgggaggacgtacgcaacgccgatccaagtatggcgctaagagaccgaaagcgggcgctgcacctgccgcaaagggtaaaaaataagaatcccctttttataaaggccagcaaagagaattaaagaattagtgtcgaacactggttctcgtttattggataggctgattgggttgagtaaatgaggtcggcggacttcgttgaagatgtaaaggacagcaaccaaaaacaagaacgacaatttattgtaaaaaatgagaaaagcaaaaccaaagaaacgggttgtattaccagatcccgtattcaatgatgtgagggtttcgaagtttgtaaaccacttgatgtatgacggcaaaaagaatattgcctatactattttctacagtgcattggagattgcgaaatctaagttgccgaacgaggaaaaatctgccctcgaaatatggaagaaagccctagaaaatattacacctcaagtagaggttaaatctcgccgtgtgggtggtgctactttccaagtacctacggaaatccgccccgatcgtaaggaatctatttcaatgaaaaatcttattatctattctcgtaaaagaggaggcaaaacgatggccgacaaattggctgccgagattgtcgacgcttttaacgaacagggtggtgcgtttaaacgtaaagaagatatgcacaagatggcagaagctaaccgtgcattcgctcattttagattttaattgaataaaataagaaataaagaaaatggcaaaatctgacgctcatttgaaatataccagaaacattggtattatggcacacatcgatgccggtaagacaacgacttcggaacgtattttgttctatacggggttgacgcacaagatcggtgaagtacacgatggtgctgctacaatggactggatggagcaggagcaagaacgtggtataaccattacatctgccgctactaccgctttctggaattataaggacgagaagtttaaaatcaacttgatcgatactccggggcacgtggactttaccgtagaggtagagcgctctttgcgtgtattggacggagctgtggctgcgttttgtgcggtcggcggtgttgaacctcagtccgagactgtatggcgccaagccgataaatacaatgttcctcgtatcggttacgtgaataaaatggaccgttcgggtgcgaatttctttgaagttgtccgtcagttaaaagacgttttgggtgcgaatccttgccccattcaagtacctatcggtgcagaagagacgttcaaaggcgtggtcgacttggtgagaatgaaagctatttattggcatgacgaggcaatgggtgctgattatagtgtggaggaaattccagctagtttgcaagccgagtgcgatgaatggagggacaaactgcttgaaaaaatagccgagtgtgatgatgagttgatggagaagtatttcacggatccttcgactatcaccgaagaggaaattatgcgtgcaattcgtaaaggaacgttggctatgcagattgttcctatgatttgcggttcttctttcaagaacaagggtgtacagcctctgctcgatgccgtgtgtgcgtttttacccagcccggtagatactcctgccgtagtgggacacgatgtgaatgatcccgaaaaggaaatcgttcgtcatccttctttcgatcagccgatgtgtgcgctcgctttcaagattgcaaccgacccttatgtaggtcgtctctgcttcttccgtgtgtattcgggagaagtcgtagcgggttcttatgtgcttaattcccgttcgggtaagaaagagcgtgtttcccgtttgttccaaatgcactcgaataaacaaaatccgaaagaatctatcgactgtggcgatattggcgcaggagtaggtttcaaagatattcgcacgggtgatacgttgtgtgcagaagatgctcctatcgttctcgaagctatggatttccctgcacctgtgatcggtattgcagttgaacctaagacacagaaagatctcgataagttgggtatcggcttgcagaaattggccgaagaagacccgacctttaccgtggctaccaatgaagagaccggacaaacggttatcagtggtatgggtgagcttcacctcgaaattattatcgatcgtttgaaacgtgagttcaaagtcgagtgtaatcaaggccgtcctcaggttacttacaaagaggctattaccaaaccggttgagttgcgtgaagtgtttaaaaaacaaaccggtggtcgtggtaagtttgccgatattatcgtacgtgtagaaccttctactcgtgaagaaggcggattggaatttgtcgatgaagtaaaaggtggtaatattcctaaggaatttattccttctattcagaaaggtttcactaccgctatgaaaaacggtgtgttggccggttatcccgtagacagtttaaaagttactgtaatcgatggttcgttccacccggtggactctgaccagctttcgttcgaactttgtgctatccaagcatttaaaaaggcttgtgaaaaggccggtcccgtattgttggagccaatcatgaagatcgaggttgtaactcccgaagaaagtatgggtgatgtgatttcggacttgaataaacgtcgtggtcaaatcgaaggtatggaatccagccgttcgggtgctcgtatcgtgaaagccacagcacctcttgccgagatgttcggttatgtaacagcgttgcgtaccattacttccggtcgtgctacttcgacgatgtcgttctcgcattattccgaagtaagttcttcgattgcaaagaatgtattgacagaggtgaacggtagagtagatttattgtaattaactatcaaatatcaatatgagccaaaaaatcagaattaaattgaagtcttacgatcataacttggttgataaatcggccgagaaaatcgtgaagacggtgaaagctacgggagcagtagtgagcgggccgattcctctacctactcacaaacgtattttcacggtaaaccgctcgactttcgtaaataaaaaatcgagagagcaattcgagttgtcttcattcaaacgtcttattgacatttacagttctactgcaaagactgtggatgcgttgatgaagttggaattgccgagcggagtagatgtagaaattaaagtgtgattaaaaaattaagtagaaatgccaggattattaggaaaaaaaatcggaatgacatccgttttcagtgccgagggtaaaaatgtaccatgcactgttatcgaagttggtccttgtgtagttacgcaattgaaaaccgttgaaaaagacgggtacgaggctgtgcaagtaggatttatcgacaagaaagataaacacactaccaagcccgaagccggtcatttcaagaaagcaggcgtaacgcccaagagacacttggccgagttcaaattcgacaccgaatataaattgggcgatacgattgctgtcgatttgtttgaaggtgcggagtacgtagatgtaatcggcgtatcaaaaggaaaaggtttccaaggtgtagttaagcgtcatggcttcggtggtgtgggacaaaccactcacggtcagcataaccgcttacgtgcccccggttctatcggtgcatgttcatatccagcccgtgtattcaagggtacacgtatggccggccagatgggtaatcaccgcgtaaccgtgcaaaacctccaagtgttaaaagtaatacccgaacacaatcttttgcttattaaaggatctgtgcccggaagtaaaggttcaatcgtaataattgagaaataatggaactgagcgtatataacattaaaggtgaggacacaggtaagaaggttgttttggacgatgctgtatttggtatcgaacccaatgatcacgccgtatatctcgatgtgaaacaatacttggcaaacttgcgtcaaggtactcacaaatcaaaagaaagaagcgaagtatctggtagtacccgtaagttgaaaagacaaaaaggtacgggaggtgctcgtagcggagatatcaattctcctgtgatggtaggtggtggccgtgtattcggtcctaaacctcgtgactatcgtttcaaattgaacaagaaagtaaaagcgcttgctcgtaaatcggcattgacttacaaggctcaggacaatgcgatcgtagtagtcgaagacttttctttcgatgctcctaagaccaaagagttcgtgaacttgctcaaaaatttgcaagttgctgataaaaagtcacttttggttttatcggaacaaaataaaaacgtatatttgtcgtcccgtaatctcacgggagcaaatgttataacggtttcggaactcaatacatacaaagtgttggataacaaggctttggttttgactgaaagtacggtagccgctataaataacttttgatgtaaggaggcttgaatatgggaataataattaaacctatcgtaacggagaaaatgacagccatgggcgaaaaatataatcgttatggtttccgcgttgatccgaaagcagataaactgcaaattaaaaaagcagttgaagaaatgtacaatgttactgttgtatcggtaaacacgatgaattatcgtggaaaaaacaagagccgttataccaagacgggccttatttccggtagaacggctgcttataaaaaagccctagttacattgaaagaaggagaaactattgatttttatagcaatatctaattgaacaatggcagtaagaaaattaaagcccacaacaccggggcaaagacacaaaattattggtgcatttgatactatcactgctagcgcgccagaaaaatctcttgtagtaggtgtcagaaaatcgggtggtcgtaacaatgaagggcatttgacaatgcgctatatcggaggcggtcacaagagaaaatacagacttatcgacttcaagagaaataaagacggtgtacccgctactgtaaagacaatcgaatacgatcctaaccgttcggctcgtatcgcgttgttgttttatgcagacggtgagaaacgttacattattgcacccaacggcttggaagttggagcaaccttgatgtctggcgaaaatgcggctcccgaagtaggaaatgcattgccgctgaaaaacatacctatcggtactgttattcacaacatcgagttacgtccgggacaaggagcctttttggttcgttcggccggtacattcgctcagttgacttcgagagaaggcgattatgcaattatcaaattaccttctggagaaaccagaaagatcctcgcaacctgtaaagctactatcggtagtgtaggaaattcggaccacgcactcgaacgttcgggtaaagccggccgctctcgctggttgggccgtcgtcctcgcaaccgtggtgttgtgatgaaccctgttgatcaccccatgggtggtggtgaaggacgtgcatcaggaggacaccccagatctagaaaaggtttgtatgcaaaaggtttgaagaccagagctccgaagaaacactcttcgaagtatattattgaaagaaggaaaaagtaatctgataaattgacaacaacatgagtcgttcattaaaaaaaggcccatatatcagtgtgaagctggataaaaaagttgctgccatggaggcatcaggcaagaagtctgttatcaaaacatggtcgcgtgcatctatgatttctcccgatttcgtaggtcatacttttgcagtacacaatggtaataaatttattcccgtatatgttaccgaaaacatggtggggcacaaactcggtgagttcgctcctacacgcacattccgcggccatgcaggtaacaagaaaaaataaggcctgagggaatgcgagttttaatacaattaaagaattgaaaaatgggtgcaagaaaaagagaatcagccaatagaaggaaggaagctctgaaaactcaatatttcgccaagttgaataatgttcccacatctccccgtaaaatgcgtttggccgcagatatggtaagaggtatggaggtattcaaagctctcggcgtgttgaagttctcgaataaagaagcttcgcaaagactggaaaaactgttgcgttctgccattgccaattgggagcaaaagaacgaacgcaaagccgaaaacggagaactttacatctctacgatctatgtggattgtgcagcgatgcttaaacgtcttcgtccggctccgcgaggaagaggttacagaattcgtaaacgttcgaaccatgtaacattgtttgttgatacaataaataaaaacgataacaaaaactaattgctggatgggacagaaagtaaatccgataagtaaccgtttgggaatcatcagaggttgggattccaattggtatggcggtaaaaactatggtgacaggttgttggaagacagcaagatccgcaagtatttgaatgcccgtcttgcaaaagccagcgtttcacgcatagttatagaacgtacgttgaaattgataaccattaccgtgtgtaccgctcgtccgggacttattatcggtaaaggtggccaagaggtagacaaactcaaagaagaattgaagaaaattaccgataaggacgtacaaatcaatatctacgaagtaaaacgccccgagcttgatgccgaaatagtagctagtaatgtcgctcgtcaaatcgaaggcaagatagcttaccgtcgtgctgtcaaaatggctatcgcatcgactatgcgaatgggagccgaaggtatcaaagtgcaagtatcgggtcgtttgaacggagctgagatggctcgttccgaaatgtacaaagaaggtagaaccccccttcatacattgcgtgccgatattgactatgcattggtagaagctcatacgaaagtgggagttatcggtgttaaggtttggatttgccgtggcgaagtttacggaaaaaaagaccttgctcctgcattcaccaacagtgccaaagaagcacgcggtggaaatggcgctccgaaaaagggcttcagaaaacccaaaactaaccgctaaacgaaattgaactatgttacaaccgaaaaaaactaaattcagaagacagcaaaaaggtcgccaaaagggtaacgcccaaagaggtaaccagctggctttcggatctttcggcatcaagtcgttagatactaaatggattacaggtcgtcaaatcgaggccgctcgtgttgctgtaactcgttacatgcaacgtcaaggacagatttggatccgtatattccccgataaacctattactaagaagccggccgatgtacgtatgggtaaaggtaaaggtaatcccgaaggattcgtattccctattactccgggtcgtgtaatcatcgaagtagaaggtgtgccttatgagatagccaaagaagctttacgcctcggtgcacaaaagcttcctgtaactactaagttcgttgttcgtcgtgactacgacgccagtcaaaatgtgtaagttatgaaaaaagcagaaattaaagaattaggctccaaagagttacaagaaagattggatgcagcggtagctgctctcaaccagttggagatcacccacagcatttcgccgttggatagtcctgctaaaataactcacgaacgcaggatgattgcgcgtatgaaaaccgagttgcgcaaacgggaacttaataaaaaataatcagccacatatctaagatggaaagtagaaatttaagaaaagagagaatcggtgtggtttccagcaacaagatggaaaaaacgatcacggtgaccgtgaagtggaaagaaaaacacccgatttatggtaaattcgtgaataagacgaagaaataccatgctcatgacgagaagaacgaatgcaacatcggtgataccgtgaggctgatggaaactcgtcctttgagcaaaacaaagagatggagattagtagaaatcatcgaaagagctaagtaattatgatacaacaagaatcaagacttacagtagctgacaacagcggagctaaggaagctctttgtattcgtgtgttgggaggaacgggacgtcgttacgcttcggtaggcgatgttatcgtcgtagcgataaagagcgctatcccttcgagcgatgtgaaaaaaggtgccgtatcgaaagctattatcgtgcgcacgaaaaaagaaatccgtcgtcaagacgggtcgtacattcgcttcgatgacaatgcatgcgtattgttgaataatgcaggtgaattgcgcggcagtcgtattttcggcccggtggcaagagagttgcgtgccgtgaacatgaaaatcgtgtcgttagcacccgaagtactttaatcgaataaagttaaagattaaatgagcaagttacatattaaaaagggagatacagtctatgtaaacgccggtgaagacaaaggcaagaccggtcgtgtcctgagcgtgttggtgaaagaacaacgtgctatcgtagaaggtatcaatatggtctccaagagtaccaaacctaatgccaaaaaccctcagggaggtatagtgaaaaaagaagctcctattcatatttccaatttgaatcctctggatccgaagacgggtaaacccactcgtatcggccggaagaaaaatgaagcaggcgtttcagtacgttattctaaaaaatcaggagaggagattaagtaatgagcaataccgcaaatctgaaaaaagattatctcgaaagaatcgtgcccgccttgcagaaggagtttaattattccacggttatgcaggtgcctgttttgaaaaagatcgtgatcaatcaaggtcttggagaagctacggccgacaagaaaatcatcgaaaccgccatcaatgagttgacggccatcaccggtcagaaagcagtggctacactctcgcgcaaagatatttcgaattttaaacttcgtaaaaaaatgcctatcggcgtgatggtaaccctccgtcgcgaacgcatgtacgagttcctcgaacgtctggtgcgtgtgtctcttccccgtatccgcgacttcaaaggtatcgaaagcaaactcgatgggcgaggaaattataccctcggaattcaggaacaaattattttccctgaaattaatatcgatagtattaccaaaattatgggaatgaatattacctttgtaacctctgccaaaacagatgaagaagggtatgctcttctcaaagcatttggtttaccttttaaaaacgcaaaaaaagactaagatatggcaaaagaatcgatgaaagctcgtgaagtgaagagagccaaattagttgccaagtatgccgaaaagaaaaaacagcttaaagcagaaggtaattatgaggcacttcaactgttgccgaaaaacgcttcgcgtgtacgtctgcacaaccgttgtaaaatcaccggtcgtcccaaaggatatatccgtcaattcgggatatcccgtatacagtttcgcgaaatggcttcggctggacttatcccgggcgtaaaaaaagcaagctggtaattatttttagtgttaaatattgtccggagaatccggatcaatttaaacaaatttttatatgacagatccaatagcagattatctgacaagattgagaaacgccatcaaagctcatcacagagttgttgaagtgccggcctcgaaattgaaaaaagaaatcacgaaaatcctttttgaaaaaggctacattcttaattacaagtttgtagaagacggtccccgaggcacgatcaagattgccttgaagtatgaccccgtaaacaaagtgagcgcaatccagaaactcattcgcatatcgagtccgggtttgcgtcgttacaccggttataaagatatgccgcgtgtattgaacggtttgggtattgcgattctctctacctcgaaaggcgttatgactaataaagaagccagcgacctgaaaataggtggagaagtattatgttacatttactaattaaaaggaggtatatattatgtcaagaataggaaaattgcccatagtaatacccgccggagttaccgttactatttccggaaatgaggtaaaagtaaaaggacccaaaggggaattggtacagaccgtatcgcccgaaattaaagttgaaatggtagacggggaaattcatgtgacccggcctaacgatgagaaacaaactcgcgcccttcatggcctttaccgtgcgttgattcacaatatggtagtcggcgtatccgaaggttataaaaaagagttggaacttgtcggtgtaggttaccgtgcacaaagtcaaggtcaagtgcttgaactttcgctcggttattctcacgccatctttttgagacttcctgccgaaataaaggtagaagcaaaatcagagagaaataaaaacccgttgattattctcgaatcgtgcgacaaacaactgatcggccaagtatgcgccaaaatccgttcgttccgcaaacctgaaccttacaagggtaaaggtatcaagttcgttggtgaggtaatccgcagaaaatcgggtaaatcggcaggcgccaaataatcattaaacaggtattatcatgacaacgaagatagaaagaagaattaaaatcaaaacccgtatacgtggtaaaatatccggtacggccgagcgtcctcgtatgacggtgtttagaagtaataagcaaatatatgtgcaattggtcgacgaccttgccgggaaaacgcttgccgcagcctcttcgaggggtatggaagccgctcctaaaaaagagttggctgcaaaagtgggacaggaaatcgccaagaaagcacaggaagccggtattacctcggttgtttttgaccgcaacggttacctgtatcatgggagagtaaaagaattagctgatgctgcccgcaatggcggccttaaattttaatcgtcatgacaggaaaaaataatagagtaaagtcaacaaatgacattgagttgaaagaccgtttggttgctatcaaccgtgtaacgaaagtgaccaagggtggtcgtactttcagcttttcggcaattgttgtggtaggtaacgaagccggtatcgtaggctggggcttgggtaaggcgagcgaagtaaccacggctatcgccaaaggcgtggaagctgctaagaaaaatctcgtgaaagttccggtgctcaaaggtactatccctcacgatcaattggcaaaattcggtggagctctcgtatatatcaagcccgcttctccgggtactggagtaaaggccggtggtgctatgcgtgccgttcttgaaagtgtgggtattaccgacgtgcttgcgaagtcgaaaggttcgtccaatcctcacaatttagtgaaggctacgatcgctgcattgtgcgaattgagagatgctgctacagtcgctcaaaacagaggtatctctgttgaaaaagtctttaaaggttaatacggaggacaagcaatggaaaaaataaaaatcaaacaagttaaaagccgcatcaattgccctgctgtacagaaaaagactcttgatgcactgggccttaaaaaactcaacagtgttgtagagcacaacgctactccccaaatcttgggtatggtagagaaggttaaacaccttgtaaaagtagttgagtaattttatccatcgattaaaaaaataacaaatatggacttgagtaatttaaaacccgccgaagggtcaaccaaaacaagaaagagaatcggtcgtggaccgggttcgggtttgggcggaacttctaccagaggtcataaaggagcaaagtcgcgttcgggttacaaacgtaagatcggctttgaaggtggtcagatgccacttcaacgccgagttccgaaattcggtttcaagaatataaaccgtgtagaatataaagctatcaatatcgatactttacaagctctggccgatagccaaaggctcgataaaattggtattgaaacacttgtcgctgccggatttatttcgtcgaaacagttagtgaaaattcttggtaaaggagctcttacggctaaattggaagtcagtgcccacgcattttccaaaacagccgaagctgctatcgttgccgcaggtggaacagtagtcaaactctaatacaatgagagcaatagaaactataaaaaacatttggaaaatcgaagatctgcgtaagcgtatcatcaccacgattttgttggtgctggtatatcgcgttggatcatacgtcgtgcttcccggtatcgatcctgctaatttggacgcattgcgcagccaaacgagcaaagggttgatgcagttgctcgatatgttttcgggaggagcattctccaatgcttctatatttgcattgggtattatgccttatatcaccgcctcgattgttatccaactcttgggtatggtgatgccctcgttccagaagctgcaacgcgaaggcgagagcggtcgtacgaaacttaaccaatacacccgctatttgaccgttatcattctgctcatgcaaggacctgcctatttggtgaaccttaaagtgcagatgggttcggccttattcccctccggttggttgtttatagtttcttctacaatcgtgcttgccgctggtagtatgtttattatgtggttgggcgaacgtattaccgataaaggtattggaaacggtatttcgtttataatccttgtcggtattatcgcacgtttgccgctggctttcgccgctgagtttacgagccgtttggcctctaaacaaggtggtcttgtgatgttccttatcgagattattttcttgttggccgtaatcgccgcagcgatacttcttgtacaaggtacacggaaagtccccgtacaatatgctaaacgtattgttggaaataaacaatatggaggagcccgccagtatattccgttaaaggtaaatacagccggtgtaatgcctatcatttttgctcaggcgattatgtttatacccattacaatcgcgggattcagcgcctcgaatgcaagctcgttttggagttctttcatgtcgatgacagggttttggtataacttcgtgttcgcaatccttattatcctctttacctacttctatacggcaataacggttcagcctacacaaatggcggaagatatgaaacgaaacaacggctttatccccggtgtcaaacccggaaagaaaacagccgattatctcgactctattatgtcgagaatcacgttgcccggttctatctttttggctattgtagctattttgcccgcttttgctcaaatatgcggagtcagcgccgagttctcacaattcttcggtggaacctctctcctcattttggtaggtgtggtattggataccttgcaacagattgagagccatttaatgatgcgccattacgacggcctgatgaaatcgggtaaaataaaaggacgtagcggagcttattaaaaaaggatacaggtaatgatttatcttaaaacagatgaagagatagagttgatgcgagagagtaatctcttggtgggtatgactttgggcgaaatggccaagtggatcgcaccggggattactacgctgaaactcgataagatagccgaagaatttatccgggatcatggtgctcagccaggatttctgggttatggaggctttcccaatacgctctgcatctcagtgaatgaagtgattgtgcacggcattcccaacagctatgcattgagagagggagatattgtttctattgattgtggtgctgtaaagaatggatttaacggagactcggcctacacattttgtgtgggggaagtagtcccggagatcagacaattgctcaaaaccacgaaagaatcgctctatttaggcatcgaacatgctgttgaaggaaaacgtataggtgatatcggccatgccgtccagacctattgtgaagcccgtggatattctgtcgtgagagagttgtgtggacatggtatcggaaaaaaacttcacgaggagcccaacgtccccaattatggacgaccgggaacaggtccgttactgaaaaatggcatgtgtattgccattgagcctatgataaatatgggatcacgcaatattgtcatcgaacgagacggttggacgacccgtacaagagaccgtaaaccggcggcccacttcgagcatacgatagcgatcaagggagggaaagccgatatactatcttcttttgaatacgtagagcaagttttaggagaaaaatcaatataactaatatatggcgaaacaatctgcaatagaacaagatggtgtaatcgtggaagcattgtcgaatgctatgttccgcgtggagttggaaaacgggcatgaaataaccgcccatatttcgggaaagatgcgtatgcactttataaagatactcccgggagataaggtaaggatagaaatgtctccttatgatttaaccaaaggaagaattgcttttagatataaataaaaaacaataatatgaaagtaagagcatcattgaaaaaacgtacgcccgatagcaaaatcgtgagaagacacggccgcttgtacgtaattaacaagaaaaatcctaagtataaacaacgtcaaggataattttattattaattttgcaaattaaaagattctaatatatggcaataagaattgttggtgtagacctgccgcaaaataaaagaggagaaatcgccttgacctatatctatggtatcggtcgtagtgcggcgaattctattttgagtaaagccggcattgacagagacatcaaagttaaggattggaccgacgatcagtcggcaaaggtacgtgaaatcattagtaccgagtataaggtggaaggtgaccttcgtaccgaaatacaattgaatattaaacgtcttatggatatcggttgttatcgtggtatccgtcatcgtatcggtttgcctgtgagaggccaaagtaccaagaataacgcccgtacgcgtaaaggtagaaagaaaaccgttgcaaataagaaaaaagctactaaataataagtaagtatggcaaagaaaacagtcgcagcaaagaagagggttgttaaggttgatgccgttggccaagcccatatccattcttcgttcaacaacatcattgtaacgcttgccaatagcgaaggacaagtgatctcttggtcttcggcaggtaaaatgggctttagaggctctaagaaaaatactccttatgccgctcaaatggccgcacaagattgtgcaaaggtggcttttgatttaggtttgaggaaagtaaaggcctatgtaaaaggtcccggaaacggtcgtgaatcggctgtgagaactatacatggcgctggtatcgaagtaaccgagattatcgatgttacgccgctgccgcacaatggttgtcgtcctcctaaaagaagaagagtttaatttttctttatttgtaaacagagaatcccgaacagtgaatagattgcatattaatcctctctgcaatcgcggctgcacttttctcggttcgcaatattataattattaaaaattttagaaatggcaagatataccggacctagaacaaaaatcgctcgtaaattcggcgaagctatttttggccccgataaagttcttacgaaaaagaactatcccccgggacaacatggcatcaataaaagaagaaaaacttctgagtatggtgttcagcttcgtgagaaacaaaaagctaaatacacgtatggtgtattggaaagacaatttaggaatctgtttgagaaagcttcgcgtactaagggtgtgaaaggtgaagtgctccttcaattgctcgaagctcgtctcgacaatgtcgtatttcgcttgggtatagcacccacacgtgcagctgcccgtcagctcgttttacatcgtcatatcgtagtcgatggcaaagtggtgaatatcccgtcgtattcggtaaaaccgggacaagtagtaggcgttcgtgagaaagccaaatctttggaggtaatagccgatgcacttgctggatttaatcacagcaaatatccttggttagaatgggacgaaagcttgaaaagcggtaaattgttgcatttgcccgagagagccgatatccctgaaaatatcaaagaacagttgatcgttgagttgtattctaaataataattgattccatggcgatattagcatttcaaaaacccgataaagtattaatgctggaagcggacaattttttcggtaaattcgaattccgtccgttggagcccggttacggtgttaccgtaggtaacgctttgcgccgtattctcctctcctcgctcgaaggctttgcgattacgtcgattcgcatcgacggggtaaaacatgagttttctacgattcccggtgtaatcgaggacgtgacgaatgtgattctgaaccttaaaaaggtgcggttcaaacaggtcgttgaagaaatcgagaatgaaaaagtaaccattactgtttcgggtacggaagtgttcaaggcaggagatatcggtaagtctcttaccggttttgaagttttgaaccccgacttggttatttgccatttggattcaagcgcaagttttcaaatagatatcactatcaacaaaggccgtggttatgtccccgctgacgagaaccgcaatccggccgatgatgtaaatgtaattcccatcgactctatttacacaccgattcggaatgtgaaatatgctgttgaaaacttccgtgtagaacagaaaacggactacgaaaaactgattttagagattacaaccgatggttccattcaccccaaagaagcgttgaaggaagccgctaaaattcttatttatcactttatgttgttctctgacgagaaaattacgctcgagaccaatgatgccgatggtaatgaagaatttgatgaagaagtattgcacatgcgtcagttgcttaaaaccaaactggtcgatatggatttgtcagtacgtgcgctcaactgcttaaaatcggccgatgtcgaaactcttggcgaattggtagtattcaataagaccgatttattgaaattccgtaacttcggtaagaagtcgttgacagagctcgatgaacttttggcgaacttgaatctttcgttcggaatggatatctcgaagtataaattagataaagagtaaaacgatgagacataataaaaaattcaaccacttgggtcgtaccaaagctcaccgcgacgctatgttgtccaatatggctacttctttgattcttcacaaaagaatctttaccacgttggccaaagccaaagcgttgagagtgtacgttgagcctctgatcaatcgcgcaaaagaagatactaccgcttctcgtcgtgtagttttccgctatttgcagagcaaagaggctgttacagaattgttcaaagaaatttcggtgaagatagccgatcgccccggagggtatacccgtattttgaagacaggtaatcgcttgggcgataacgctaaaacttgcttcattgagcttgttgattacaatgaaaacatgcttaaagaaaaagtcgctaagaaagcaactcgtacgcgtcgttccaaaaagagtgccgctcctgctgctgtgactgccgaggctcctgcgaatgaggctcctgtatccgaagcacctgcaactcctgtcgaagagaaagcagcagaataaactttattgcttcatatatggaaaagaaaaggctcccgataacggagccttttcttttttaggaaggagtatagagggtatcagagagagtatcgttccttctgccggttctttgttatggtagagaaacattttttctgtgtattattgtaccgtagagagattgctatgtattatactatatggcttatgataatgccgttgttcataggctcatagggtcgcaaatgtttctgaatgaatttgtgttttgtagatgggtaaaaaaaggaactgaaaatacaattcagttccttttttatgattacatttcgtattaccgaaatggatataagtcttgttacaggcttgttatttcacgacaactttggttgcgaattggccgacttttacgatataaatgccgggaatcgtcgttaaatgacaatctgtctctgtgactttttgtgtagagataagtcgtccgtcaggtgtgaaaatagagagcgtttgtccatttgctcctgttacgataatttttcctgtacctccgtatattttagtagaactatcgacgattgtttcgattccgcttccatttagattgtcgatacggatattgtcgatgagtatatagggcaagagagcgtgatgcgaaaagagtctcagttgtataatttggtctttatagtcgttcagagaaacctcgacttttacccacccgtctttgtcggacagctcgtacattttgaatgttttcagaagagtagggtttccgttgtgtacgaccgatacgcttagctcgttattgtttacttcgtcttctcctatgatattgtatatatagaacgttaaggtaggagtggtgagcccgctaaggtctattttcccggtgtcgaaagttccggtatcttctgagtaagagccctccgaacccagaaatccgttgtctccatcttgcgattcaatctccgagtcttcggttgtataagtactccataaagcatagtcttcggggtaaataccgaagatgtgggatgctttcccttctgcgaatgattcgtgatagggggtggaataagccggtccgatgggtaagaggggagaatagacgtagtttgagattcctcctttggtctcggcgactaccgaatattggacaaaggtttgaacggaggtgtcatcgagtgctttgaatgttttggaagtcccgctgatgtttgagaacaaaagattcgactgggagccttcgctgtaaattcggtaagttacaaattcgggatcgagattatttcctcgtatgtcggtggtaacgggagtccagccgatagttacttctccgggagtagatgtttctacgagcgtgattccggtaggatccgaaggttcgagtgtgcctacgaatgctttcgtttcgacggcagggctttctcccgaagcatttacagcaatggcagaataagtgtaacgggagcactcggggacttcgtccacgaatgtcagttccgaaccgggttcaggggtagagaatgtttttatcagattgccgtctcgcatgagtttcacactttcgagctctgttagatcttgtccgttcaggtcaagagtaggagccgtaagggatatatcggctttcagctcgccgttggtacgagtattaaccacgagattcgatggggcggaaggagtagaggctccggcggcagcgccaacggttaagttgttaacggatatggagtatgtgtcggcggagctacaaccatgaatgccgatataataaatcccactttctgttggtgagatagttccggtataagccttgtaaaccgtatgtgctatcgaagttttttctataatggggttgaccagagcttcgggtgttttatccttaccgaacatgatttcaaaagtttcttgcgtagtctcgtttcctgtcaatatatttacggaaaaactatacattttaccgccttcgaggttcagtgccggggtaatcaaccaatcgtccatcgccaattcggagttgtaggagatttgtaccttcccaaaataaggctcccattttgttccgtcttgattgctgtcgatgattgtatagctttctaaaaaactttcgtcggcaaatgtttcggaatagggtggcgttaaaggctccgcttgggcgttttgtgcggttgtgacagattgactgacttgtgatgtcgcacttagtcctaatgacatagcggcgcatagagataaagccgcccttttaatgtaatgaattctcataattgtgaaaatttaattaatggttggtactatgatagattaactcatgtatatattttccctgtctctctcaaacctttaaaacaaatttatagacaaaagaaaaatgtatgaatatgttgaagttaaaaatgtataaaatctgtctagaataatacagtttggagtatttcttttcaattggaataaaatcgatattagacttatttgtttgataagatggataaaaatcgtatcttgccaagaaaacaaaagcgattgtttttgtgtttactattataatacagttataaactaaataaagaccaatatgaaaatagaaacgatcaaagctcgtgaaattctcgactctcggggaaatcccacggtagaagtagatgtgatactcgattctggtattatggggcgagctgcggttccttctggcgcttcgacaggagtgcatgaagcccttgaattgagagatggtgataagaaccgatatggaggaaaaggtgtggaaaaagcagttcgtcatgttaatgacgtcattgccaaagctttgaaaggagctaatccatttgaacaaagtagcatagattcggctttgatagccctcgacggtactgctacgaaatcgaaattgggggcgaatgctatattgggtgtctctttggcggttgccaaagctgcggcagcacaattgggaatgccgttatatcgatatgtaggaggtgtcgatacttatgtgatgcctgttcctatgatgaatatcatcaatggtggttcgcattccgatgcgcctattgcgtttcaagaatttatgattcgtcctgtcggggccgcttcgttcaaagaggcgcttcgcatgggagccgaagtttttcatgcgctgaaaagcgttttacacgctaagggattgagtaccgctgtcggtgatgaaggcggtttcgcgcctgcattgccgggaacggaggcagcgatagagacgattctcgaagccattagcaaagccggatatatgcccggcagagatgtgaaaattgctttggattgtgcttcgtcggaattttatatcgatggagtgtacgactatactaagtttgaaggagctaacggtgtgaagcggacgacacagcagcaagccgaatatttgcaagacctcattttgcgttatccgatagattcgattgaagatggcatgagtgaagaagattgggacggttggcggttattgaccgatttgattggagataaatgtcagcttgtgggggacgacctttttgtcaccaatgtcgaatatcttacaaaaggtatacgccaacattgtgctaattccattttggtaaagctgaatcagataggtacgttgaccgagacgttgagggctgtccaattagcacagcgcaatggatatacggctgttatatcgcatcgttctggggaaaccgaagatgccactattgccgatattgcggtagccactaatgctgggcaaataaaaacaggttcactgagccgctccgatcgtatggccaaatacaaccaacttttacggatcgaggaacaattaggagatattgctcaatatggatataagcaggtaaactagtcaaaagttaggaaaaagaaaagaaaatcccaatacttaaatagtaatgggattttttttggaaaaaatgtttaattataaaatcgtgaggtacagtctattgtataattttcatgttatacagcataaaaaagtgggaaaaaaatttggagcggagtaggaaaatgaattaactttgcaaccgcaaaagaggaaacggggcacgctccggggaactttttgtcaagttcattgaaggaattgaagaatcccttccgtccgggtctacataattcaccggattattattacaataggcatagggcgagatagagtaatatttctcgcagagaggatccatcgtcataaatcggcagagagccggataatacatacgagcatcgaagtcgtaactgtcatagccgtgcagctctataaactcctttcctccgtatttatacggctgctcttcgggctggtaatgggcttcataaggaagaccgaaaggatagtattgcatacgttggtaggtgacggtatgctctatgggttttgggcgaataggtggtttatctccgcctatcgccccccggttcgtcaaggaaaaaggaggttccactggtattagttttgctaccgcactgccgtagacggtgcggatattcccttgataatcccgcacgaagtaccggaaatcttgttccgaacaatccaaatagccgtcgccgttatgaattcgtatcagggtatcgctctcgaaatcggctcccgcatattccaaagaaccccgacgtgctgtaacatgactgctcatggccgcagtccccgatgtactgccgaaggtctgccccgcagggataacgactgttgtcagtggtgtgaggtatttactgccggttctcttgccgtcggcggtgtaataattcacgatagccgacccgttgcggaactgcacggttgcgagaaatattactctatctcgccctatgcctattgtaataataatccggtgaattatgtagacccggacggaagggatatttgggaaatagattacgatggcagaattataaatcgtatcgagaacaagacccaagatgccttttatatggtggcaaaagatagtaacggtgattatcaacggactttctcggtcgatgaagacgggaacaagaagtataattccatcaatttcgaatatggagtcataaccgattcaaaaaaagcatggtttttcaatcaggaaacaagtttttctattaataatgaatcagacggagcaaatttattcaaattctttgctaataatacaaaaattgaatttgggttaataaatacacaaaacaatggttcccttgttatgactaaccatcaagaacactccattaaagtaagtaaacaagcaaaaagattaagtatgaatggagcgactgtaacatcgatcgttcacaatcatccaaacaattcatatccatcggggtttagaaaaaaagacaatcatggtgataaatatgcggcagcacttatctctaattccaaaggatatagagttgaacactatgtatatcagccacaaaaggggcgtttaataatgtatgataaaaacaaaattataggacctatcccatgggaatatattttctcttctaataaatgatatataagacacttaatcccctcaaaaaaataagaattacctttttatttaatctatttttgaaagtatgagaaagataattagtttcatattcattacttggtttatttcctgttcaggaaatagagatatcgtactgacagattttacaaaagaattaatctccatatatcttaatgactccgaacatatccaagcccaaaaaaggaaggacgaaataatactaatttctacaacagattcactatattacaccttattgatatttagcaacaatagtaagtcttataaatatgagactttcgatttcgtaggacgaacaatatatatgggacactctatcaaagcttttggagacaagattcctatcttttattcagggaataattttgttaaacaaaaaaggcaagatatcccaaatatgaaggaatatgatccatctgtctggcaagttagtttttataaagacagctctttttgtaaaatgagaacatacaaaactactccaagcgaaaacattgcagatatagaaaacttagcaaaaaagtattttaaaatatcacgaccgtcaacaaacgaaatatatcaattatacgaagttgagaccgagccccaatttattttaggtaacgattctttaaggcaaattataacatcgaattttaaacgagtaaagagggctcctatgcaagggaaaataccagtagtagttgatgtcttaatcgataaacatggtattgcaaaactaatcggtatcagaaaaagttcgggagacacagtaatcgatgaggaagcattaaaagtagccaagataatatgccaatataaatttatcccggcaactcatcgaggagaaactgtcgagacaatctttcccattatgtttctcgataatgacgttaaagctaaataactcatactaacaataaagtataattacgttttgaaaaataaaaagattgcttccatttgacttgtcaaatatagtatagattatattcctgaaagttcaaacgatatgaatttcacattcggacgattgtcttattttgtaataaaggactccaacggaaatatgacggctgacctcgaccgggatattgtcgccatacgatacaacatgttgaatttgcccgataccgtgcagttccgcaacgggtcggctatcgtgaattattacaccgccgacggcaagagaaccggcagtaaatacctcacgtggcctccccgttttgcgaaagtgctgcaaagatactgcctttctctattacattccaaatttttctcaatgtttttttgaattattttttaaataaaatataaccatataatattctgcattttacagaattatttttttattgaatattttattcctcgcctctatttttattatataaattcctcgatcgacatttatcgctatttggtttttcccctcagcagccactgcatataacatttgcccagataaattgtaaaccgatattcgttcggaaccacaaagagtcgctattataatttgccgtcccgacacatatacgatcggatcacatgatcgaacagatgtaacagccgagatatcggccgtaacggctctctgtaccgaagaccaatttgaaacaacatctttacataccgaacggacttgatagccatactctgtctgaggagaaagcccctctataacatgagtcgtaatattcccgaccttttcctgagagaaaatatccttaacacaagctccataagtaatcgaagcatcatcgacagctacgtttcctttttctttatgtgcataaacgacttttaccgaagttacctgctcatcgatcgaaaaggtatattcgggataattcttagaagtatcgacatatcgcaatgtatcaatagctgtccaactattatccgattctttctcaacaacaatgtaggatcccgtcccggaggatgcaaaacgatacataaacgaaaactttactataccctcgttataccgaggggtctgtaaatattctcccgtatttttcaatgcgaccgaaggagccgacactccgctacttgccgcagatgtataattaccagaagctgttccctcccaattatcgggcagaggttttccggacgaatctacttcgtcaaatccctcagtataaacatgttgttcaccagtctgtgtaaaacaaattatctcataattatcggctccctgaacttcttcccaatttattcggaaagtactatcggttatatccgaggcatcgagcaactgcggcacagccagagaatctgtctcaaattgcatgctgtatgcggcctttactatacccaaaggtataacagcgctcacttgataggtgtagcgagtcaacggtcgcaattcggtaaaacgatagttttgtacgagcccgattgacttatcggtctgtatatattcccgtttgtcgtcaagctgcatacgaaaaagccctatcctcgaaaaatcatctttcggagacgatatccactctttcccattatatcgtgatgtagggtgtgttatctcggaacggcgatacaacgttttatcttgcccccaataagctatttccccggcaacacccaccacatcaatcattataccatcgcgacaaagcgcaacagcatcattcccattgaaattgagaggcgaagtttctcccccgggaataatctgcgaagccttagcgattaactccccatcagtcgatagcgaatttaataataaataggtctctccgttatttaatatagaaggtcctaacggagtatcgttcacgaaagaaccactgccattaacctccattcgcaaactgtatgcagaaaggtcgaccgggactcctgttccgttatagatttcaatcgctttattataccccgatccctcgacataagccgaaataatcaaatctccggcagaggtattccccgaccaaagagaaacttggtaatcgatagcttcggggtaattaatccaatgtatcaaagcctcggtggccgtaacatcggatgccgaggtttctataaacgaagggactgaaactacttgtaccggtatgcggtacggggtctcaatgccccctcccgaaataatcaccgtatcgcgatattctcctttcctcagctctcgacacgatatttcaactgtacaaccatcgtgcacttcttgtgccgacacttcgtaatcggaaagttcaaatatacctcctatcgcccacgagagggacaaagaagaggtgaggttgtttcccaatatatcaagttgttcgcttttattatcacccaacataatcacccccatatccatgatttgatcccgacgaggcaaagccaagaaagggagagtctctgcggggaacctgaacgggtcttcccgatgagctccccatatatactcgaccaaatcgggataatctatataaggatttcgattcccctgtatggtataaaccgaatcgttcctcgccaactctctttcgcacggagggtcttgcgaatgccactccaacagcatgtccaacgcccactctttccataccggataagtattgttatcgagcataggcgactgccaatagtcacacaagttttcataggccgttacgacatagaaataggcacgagcaaaatcgcccttatactcgtcggcaggttcgaagcaacggtcggtataatctactccccaaccattctttcctaccttcgagaccccattgtcaaagccagaaactcccgtgacctcacccaacggcaaattgtttttagcggaattggccgatccgtctgccgggaacaaatgatgcaaatccctataagcattattttcataagcgccccaccaacttttcgggaaagagtgctctatatgcatgcccccgacggcattaaagccatcgaaatagcgtatttcatcggaatacctgtcccacacactgccatcgtctttacggtctgttcgggagaagccctcccacgtggcatcttccccactaccataaccgagtgtatgcatcgaacttattatttcgtataatgcagttttcaactcagctccatgttttccatcggccgcataataatagcccgcaggaactgtggcatcaagccgaaatcccagaaacgaaattcccaataccccgaaaattatccgggcacaatttttcatagtactcataatacagatttttaatctcaacgcgagctatgcactctcaccgtattttgtaacgacggagatacaaccttcacgatataaattccttcgggcaactcccattcgacctcctcgctatgcaaaatccgcgagccacacaaacgcccgtccatcgtataccacgaggcaacagcattcatcggggcattgagtatatgcaacacattcccagaggtaaatatcaaaacacgatctgcctccatatcatcgacagcagccgaccacgtagagactgaaatcgtattagacaccgactgagcctcttccccgatatagggagtcaccgtataatgatactgcacaacgggagttaaatcggataccatatattcgtttacatctcctactcgacgaggatatccttctaaaacaacaggggtagaacctccaccgctcttcaccactacgctatgcagatagacccgatgatcgctcttggccatcaaggtgattgttgatgttttcgttccctccttcaccggaatagttgtggtcgtagtaccatcgaggttaatctggctaatctcttgaccatcgaccgaaacaaacaacacagacagatcttctttataaggttcggccactaccgttatcgatacatctccggccgataaatcaaggataggagtagtagcgctaccgtccttactacccgaacctaatcgtaattttcccgattcaacagcagtatatccctcataggtccacgaatcgggcttcgacgaaaacgtcacgtccaatatgtccttctcaggaacactcgacgaatagtcgtcgtaccacacattcaattcataatcagttgcttccgatttcggagtccaaaccgccacaaaagaatttttcgtaatatctttcgccggcaatgcgacaaaatcgtcgatagcctgccctttcaaattaacgataatcggagactttaacccacctcccgatatttccaaaacagcttcgtgcgaacctactaccgaagaacgataggctaactcgacagttgttccattattaacctcatcggctgtaagttcccgacgattcaccgaaaagcactcactatcattaccccctacttcaaccgaaacagcactctcgatattacgtcctctaacagatagttgaaccgttaccggtgaagaactattcaccgaagcgattcccatatcgacagtcgatccgtttcgaggagcctcgatatacggagcatctcctccatctggcataaaggggatattacgactgtctccaaagatgagatcgaccaattcgggataatcgataaacgggttccgatttccttgacgcgactcatagacagcttcatttctatccaattctttttggctaacggggtcttgttcgtgccaacgaagtaacatattgagttgccaatcgataatatgaggataattagaaacaaatatacttccccaattcgttatacggttttgataccgagtagcaaagtagaaataagtacgcgcaaaatctcctttatattcatcgttcggctcgaataccgtacccgaataaccgggagtcacacatttcccccatttggaaaatccatttttcgagctcgatgcgccagagcctacctctccaaacggattattactacgcattccatttatttttccatcggttggatagacatgccacacatcggacttcataggcgactgctcactaaaccagcttttaggaaccgagtgctccctgttatagcaatcgccttcaaccccatatgtgccacattgatcggttccaaaagtatagttcgttatatcggaatacatatcccacactttcccatcggaacgtctgtctgtcgttttataaagattccacaagccattataacctacatcggttgcatcgtttaagatggtagacaaacttttttgcaaatcctcaccgctttttccaacagcatcatcataatatccggcaggaatctctgcaaatacaaagaacggaaacaagcaagtcaaaacgacaagcaacaaacagttacgtgaaatacagttcattatctattatttaagttatatttttagaaaagggacgtaaagataataataaaatatcaaaaccgttttaaaatcgatggatttcacaaaaaacaacaaagccgactatctattaagatgtcggcttctatctatataactaacctgttctttcaatctatccctgaatcgagcactcccgaaaagcctcgttttttatctttccaaatctgatacctataaaccaagcaagtcgtcacaaaataaactcctgttagaatccataacatcgtataggcatgacgcacatcataaataccagccccggccgtattcatacgtacaaagccttctattccccaagtagacggaatgagagcacccaaccacttccagtactccggcatggcataacgaggccatgtaatacccgatatgaacaaaaatataaccgaagtaaagacaaacaacaagaaagaactttcgcgttctcgaacaaatatagatagcgtcattccaaaaaatatagaagataacaagaacggaacggcaaaagaataaatttctacctgactacctatctgcggatatttaaaaagccacggaataaaatgtaatatgtatgccgtacataaaatatacaagctaaaatagcacaatgatttgcctatcaccaaatgcaatacattattgtgcatgtgttctcgtccactgtaaaacaggtgtaactgtcgatgttcataaattcccccagccatcataccaattcccaaaataaggctctgctgtaaaatcaacaccaatatggcaggcaacaaaaacgatgccaaacccgactctggattatacaaattaatagagctatacggaatgggttgtgtcgctacattgatttgttcctgcgtggctccacccaaagcctgagtctgtaactttcctccgaggttcatcgtcacatcggtcaacgcaattaaaaaacctttgtaattcaagagaatactcatatccgaatagaacgaaacgacactttgttcacctcgctctatttttcgactgaaatcttccggaataaacaatattccataacaatgcttttcatacatcatgtgcttcgcctcgtccatatcggcacaatacgaaacgatatgcgcattcggtgtcgcgtccatctcacgagcgagctcccggctcaaaggggtacgggcattatccacgacgaccataggcacttccctcactacctcagggttatacactgcggcatatacaatcggataagcgaatggtaaagcaaagaaaaacagcacgattcccaaatcatgaaaaacagcacggtattcccgccgccaaatgtaataaatgtcggacaaacctatttttatagaatgaaacaatttcatatcattttatttttacatcacggtacatatacttgacgcatcaaagcctttttcaaccggggtaacaacggagtggatgccaccgcaaacaaaatcaatgcgacataatgtacacgcgaataataaagaggtattccattcaatgcctgatctacataaatcaaaaaataatgccgtacaggcaatacatacgagatagcttggaacggcaaatacatagccggcacagggaaagaaaatcccgcgatagaaagagacaagactcccaccaaaccaccgacactcaacccaattcttaacgaaggcgcaaaacacataataattaccgcaaaactctgtgaagcgacaaccaacaagaacatcgcgaaaatcatgtgccaaatgctgttatgcatcgggaaatgcaaataaccgtatagcaacgacaagtataaaagccccatcgaaaaaaatatgatcgtttggggaatgagtttacctgtaatagcaataataatcgaatcgtcggcagtccgcaaccattccctcgacgtggctcgtttcatctcagatccgatactgaaaaccgtaaccaacagaatcatcaattgcaataacccgggaagaaaagaattattcagataaaccgaatagctaatccacggattgcccaacgcatgcatatccgtcgctatcggctgcaacttagccataatctgtgactcctcggctcccgcagaaagtaatacttggcgcacgactgcacccgaagctaacaccgacatggttttgaaacttttatatagcagcgacgcaggaatgtaataggcatcattcgtataaaaagaaatttcgggttgacgaccggcgatagccttcgcttcaaaatcctcaggaataatcaaaaatccgaaaatatcacccgactgcatcaactcccgagcctcggtaaagctattcaacttataggcaacatcgaccgactcctgagatccaagctgttgaataaaattcctagacgtagaggtgtggtcgtgatcgacaatcgctaccggaatcttatgaggtaacccttcgtgcatcaaggaaagcaggaatatgcaactgaatagcggcgctcctaccatacaaagtacatagataggacgcgaaaccagttgtttcaattcccggacaatagtagcccaaagccccgtttgatattccattcgttctgacatatagacattctcgaagttacagaacttccattttattttttatctcttttcaacaataccgacattcccggacgtagattatcgaccggttcgaccggacgggctttcacttggaaagttttggcatcgtattgcccggtaactttcgtagcgcgccataccgcataagatcccatatcccgaatataaaatactttcaaagtcacttccttattttccaatgccggaattatagcctgtacttcggctcccatagtcaaattttctaacaagtcttcccgaacattgaacgaaacccacatatcgtcgagtttcaatacattcataatcggagcacctaaactcaccaattcccccacattcggaaaaatatcggaaatttcaccgtcggtaggagccgtcagataagaatccgacaaaatagactcgacctctgcgacactaccttgtgcggcggcgaccatagcggcagcggcagccttatcctcggcctgcgcaccggcctttgccatttcatattgcgatttagccgcactttcagtagcgaccattgctttataagcagcctcggcttcatcgcgtttttgttccgaaactactcctttcttatacaacgactgcatacgctcatacgtcttcttggcgatcgttaaaccggcttgagcctgttgccacatatcataggcagaattcaacagttccacgcgcgtaccactgtccacctttttattctgagccttagctacggtttccatagcctcggcctgtgaaagtttcgcctctaccaacgaagaatgaatatgtaccaatgtatcccccgccagaacatgctgtccctcctctaccatgaattcgaccactcgaccgggcaactttcctgaaacccgtacttgtgtcgcttcggcttgcccttgaataatttggggctccggtttaagcaagaataatccgatcaaggccaaaacaactataatgacaatcaaagcaatgaggcctacgaccaaactgcgctctttcttttctcttagattttccattgtaaatctgttttgctattttttatattttctattttcaatatttcatagtgcccaaagccttagccaaataaacctcgcaaagtcgggtatcgatttcggcatctattttttccgattgggcttcgagccatgctgtttgagcttcaagaacatttgtcgtcgtaagtactccctcttgaaatccaagttgcgcatttctcaaattttcatcggctttctccaaatttttcacagccattttataagttctataagcctccgaagttttaaaagccgcttgacttacctgcaattctatcttttctttcacgtcggccaattccaacttggcaacaaccgcttcactcttagcggcacgaatcttattgtagttctttccccaatgaaggattggaatattgagcattactcccacgctgaacataccgtcgaactcgtttttaaatccgttaaatacgttgggattagtaaaagaataagtccccaccaaagccaacttgggtaacatatcggaaagagccaagtttttcttcttttcatagattttcgccgcataattaagactcaacacttcgttccgatttttaaaaacctcctccatattatacgacaacggagtctcctgcggagctacacgctccaacgattcatcttcaagcgtaaatatagaattgaccggcaacccgcagatttgagccaaagccatacgcgacaaagccaatccgttatcgaccttagcaagggttatctgagcggcattcaacttcacggccacggtcaatccgtccgactgagtcgcaactccttcggctatcatctcttgtacatgccggttcaacgtatcgagtaaagccgtataactctcggccagttttctcttatgaacgagagagaccacttgccaataagcctcatctgtctgataaataatttccttctcggccgtattcttctgcgacaccgccaacttctcggcatatccggcaatatcgttcaatgcctttatcttacctcccataaaaataggttgcgtcagtgtcaccaacccggcatacacattatgtacatcgaactcgaaagcctctttcgggatcatggcgacagtcgacggtataggctgcccgttgttcaatataggttgcccggtcgccgggttagttaccacattatacttgtattcttgactggctaaatcgaatgtctttgtaggcaaatattggtcggactccaaaagcgatatcgacttttgattatacatataagacccggtaaaatctattcccgggaaataagctcccctagccgatttttttgtatagcctgcccctttcaccttttcttcggctatacgtagttgcttattattctttaatgccatctgtcggcaagaatcgagcgaaaccggttgttgtgccgaacccatcagaaaagataacaagaaggctgctaacaatgccctccctgcccatatgcttccatttattttcatacgcttctatttatctcttacttttctttaacggaactaatacttgttttgcttatagttgcataaacaattttatttcttaaaaaaataatgcacccggcattacaccgcaaaaatacgccgagtttagcattaaacaaatatttaaagattttagttttctatttttactattttttaagaatcggctttgaattgttccacgctgtattcgaaagctattttcgaaagcatttttcatgaacgaaaaaaactcaataaccaaacgatagaatgctaccgaaaatatacttcataagatacatagaagaatcatctctctacgcaaaatatcaactcagtcgatattttctccttttatacctctaacccctcaatcaaagattatatgattttttcacccccctcgccctgcgggctcttcccctattgctgcgcgacacagggggagagggctaaaactcacttcggagatttcaatagaggagaggagttgaataatctggtactaactatgaagtgaaatgtttccggttaggttcaacttgttcaattttttggggcacttcacaaatgaatagagggttacttttaaactcctcctctgtgttttgcacggcaaaatatagggaagatggcacgtagtgacggaggggttaaatttttcaagaatctattcggccgctttttaaccattcatcaagaagacaggaatacacttatcgacaagagattcatcgctaaaattcaagtctgcctccccacaaattatcgacaaagccaaaatatcgataaaatcgggaagagctttacccatactttcacatcggcccgattctccaaacaaatacagaggcggaagctattgtttcaaagtgaacgaacgagtccctatcttatagttatcggcaaagatatccacgcgatattccccgggatataaaaattcttccacggcccaatacattgtcacgtcattcaattcttcacctgtatattcaatcaattttcggcaagaataatttatttcacgatcttcaaaaggaaatacatcggccctatctttcaccaatacatctccatcgggttttacaatacgggcataaatatatttctcaccgacttcggccgttacatttttggctatggagaatgttatctttattttatcggtctttttaattttttttgcagtttttcctctcgaatctatcggagtcaccacaatacctacggcatcgagctttgccgctaatgttaccttttcggtcaattcctctcgttcttgtttcaattgacttgctgtttgcgctacctctctataccgccgggtcaccttcgcattctcttcccgcaactgtttattggcaacattcaacgaatcgatttgcatcacataatgacgcataattccccgcagcgtagtcaactcccgctttaattcctcgatacgagccgaactcgtatttttcacagtccgcaactcttccaacaatcgttgaactttcaccttctcggcatcgagcttttcgatcaacgaatcgttattgaacatcatcttctgtccctcgaactgatcgtactgggcagccaaatcgctatattctttttcaagctcgctccgctgtttgtctatctccacttgctccttgaaatcggacattgctttatgttgcatgtatatgaaaatcccggttcccaacaatgcgacgaccagaacagcgataacaacccataccaaattactccttttcataatatacagaagcttattttttcttgcaaaagtaaatcattatcgaatatcaatcaagaacagacagattatttaagttataaatgttaaattatattcttcctcaaattcgaaaaaggaatcatgcagctcttcatttcaccaaagaaatattggaaggacaaaatctttttgtcataaaaataattaagttaacaccgttgcaagctattttccctatctttgtgaaatcttagataagttatgcacctaagcgattatgggaaaaataattgattttttcaaaaagcacccgataatcaaaacgttagtattgatgattatcgttttttttctgctgatagcactcactctatacgggttaaagctatatacacggcacgggaaagcggtcattgtccccgaggtcaaaacaatgattttacccgatgctctacgcattctcgatcgggaaggatttcggtacgacataatagactctctgtttatcgacggtgcggttccgggcagtgtcatcgaacagacccctgcgggcggcagcaaagtaaaagacggtcgaattatttatctatcgatcaacgcttactcccccagaatgatttcttgtccaaaagtctccgatatgtcgcttcgccaagctctttccaccttagaaagtgtagggttgacagacattaaaacacaaaatgtaccatcggaataccccgatctcgttatcggtatacaatacaaaggcgaaaacctcgaacaaggagataaaattcctgcgggaagttccttaactctacttgtgggagacggcatacccgaagaatatcccgactcgacgatcgacgagattccacaaaatgcggaagaagcacctctcaccgatgaaagttggtttaactaaacaatctcgaatgcaatgaacacttgcgacgaagacatagaagccgatgacaaaatcatcgcagaagaaggtgagcgggaattgtatgaacacttccggttcgtggcagacaaaggacaaaatctattacgagtagataaatttctcgtagcacgtctcgaaagttcttcccgtaaccgggtacaacaggcagccgaagctggctgtattctcgtaaacgggaaagcggtcaagtcgaactatcgcgtaaagccgctcgatgtcgtgtctgtcgtcatggatcgacccagatacgaattcgagatcataccccaagacataccgctcgatgtcgtatacgaagacaaaaccgtcttggttgtcaacaaaccggcaggattggtcgtacaccccggacacgggaattatagcgggacactggtaaacgctctggcatactatttccgggatacccccgactatgatgtaagcgacccccgtttgggattggtacaccgtatcgacaaagacacttccggattattagtcatagccaagactcccgaagccaaaacaaacttgggattacagtttttccataaaactacccaaagacaatacgtagctttggtatggggtattatggaaaatgacgaaggaacgataaccggaaatatcggtcgtagcctcaaagacagattacaaatgaccgtatttcccgagggagacttcggtaaacatgcggtaactcattataaaaccttagaaagattgggatatgtttctatcgtcgagtgtaagctcgaaactgggcggacacaccaaattagggtacacatgaaacatatcggacacactctttttaacgacgaacgttacgggggagaccaaattctcaaaggaacgacctttaccaaatacaaacaatttgtacaaaactgctttgaaatttgcccccggcaagccctacacgccaaaactctcggattcaaacaccccgtaacaggagaagagatgtttttcgattcccccataccgcaagatatgaccttgctgtttgacaaatggcgtaattatacggccaatcgagatatataaaacataagaataaaaacaatagacggttctataccttaaaaatattaatgttatggaatgcccaaaagaatttgacgatattcgacctttttacgacagtgaatttcacgacaaaatgaaagttctggttacagaacccggattcgagcacgctgttcgttacgtactccgcgacattaactacgaactattctgccaagaattgttgactatcgacaacaaaaaagactttcaattactggttatgcgctctttcctagaagggctaactcagaaaaccaccaaaggacttaccgggaacaatctcgatgtactcgataaggcaaaaagctacacattcatgtccaaccatcgcgacattgtgctcgacgcctctctactcaatctgctactcattcgaaacggaataaaaaccagtgaaatagccatcggaaacaatctgctcatatacgactggatatccgatttagttcggctcaataagagttttatcgtcaaacgagacgtaggcgtgcgccaaatgctcgatgccgcccgacagctatcgggatacatacatttcgctataacgaaaaaaaacgaatcggtatggatagcccaacgggaaggccgttcgaaagattccgacgaccgcacacaagaatctctcattaaaatgttaggcatatccggagagggagacctcatcaataatttgaaagaaataaacattgttccggtctccatatcctacgaatatgatccctgcgactatctcaaagcacacgagttcctgctcaaacgagacaatcccgattttaaaaaatcccaaagagacgatttgcacagcatggaaataggtctactcggcttcaagggtcgtgtacattttcaaatatccccgtgcatcaacgacgaactcgacaaattatcggcaatcgacgaaaaatcggaattactgtccaacatactcaaagtaatagacaaggccattcataccaattataaaatatatcccggtaattatatcgcttacgatattctagacggacagaaacgtttcgccgaccgttacacaaataaagaccaaaccacttttgccaattacctaaactcacaattggcaaaaatccccgacgtaacgagtaaagacaaagacttcctaaaagagcgcattctctccatgtacgccaatccgttgaaaaatcaattgatagcattagggcaagaagcctaaatgacaacacaataaggaaacgatgagtgttttcaacgcaacactcatcgtttccttctcaacattcgataaaattatatgcggttaccccttcttctcattttacttccactgttggctctatcggccgatttctatatctttcgacgcaacttccgtcataaatctaaatggataaaaattctttggtggggcctttccttagtcactctccttctcgtgtgtataggggtgacggggctattcgcttttccggggaagctcgatataaatatctccatgtggatattctatattttcttcttggtctacatgcccaaatggttttactccatattttctttattcgattacgtcccccgtttatggaaaaggaagaaagggaaatggggtcacatgatcggtacggcattagccctgtatgtcatcgggtccatgctctacggcgcattctatgcccgacaacaccccatatataattacaggacaatctcttttcccaatttgccggaagacttcgacggatatcgcatcgtccaattctccgacctccaccttgaaactttgggctccgcagccaattacttgccccgatggataaaccgcattaatcaactacaccccgaccttatcgtttttacgggagacctcgtcaaccgccgaggaaacgaactgcctccttacatgaacgaactttcccgtctctccgcgcccgatggagtatattctatcttggggaatcacgattacggcgactatttccattggggaaaccccgaagaaaaagaacaaacactccgttcgctcatcgtcgacgaggaaaaaatgggttggacgatgttgaacaatcgttcggtatttcttcgccggggaaacgacagtatcgcccttatcggtgttgaaaattgggggcttccacccttcccgcaatacgggaaattggatctggcatattcctcgttgaacgattcggtcttcaaaatactgctctctcacaacccgctgcattggaaacacgaagttattccacactcgaacatcgacctcactttatcgggacacacccacgccatgcagctgaaattaggctggaaaggatttgaatattcttttgccgaacccttgtatcccgaatggagcggtctatataccgcccccgataaacaccaaatgttatacgtcaatgaaggtatcggttgtgtattccttcccatgcgaatcggcgcccgccccgaaatcacgattataacattaaagaaagaatcatgaatacatcgatatacaagctcctgtcacaatcactgggttttgccgagaaacaaatcgaaaaaacaatcgaactgctcgacaacggagccactattcctttcatcagccgttaccgcaaagaggctaccggttccctcgacgaggtacaaataggtaatatcaaggaagcatacgataaactatgcgagaccgaaaaacgaaaaaaatttatcatttcgacaatcgaggaacaaggaaagttgtcggaagagttgaaacaacgcatagattcttgttgggacattaccgagctcgaagatatatacctaccctataaaccccgcagaagaacccgtgcagagatagcccgggaacacggattagagcccctcgccaaaatcatcatggcgcaaaaaagcgaaaacataaaaacgagtgccgcccgattcgttactcccgaaatccccgacgaacaaacagcggtcgaaggagcttgcgacatcatcgccgaatgggtctccgagagcgaacgagccagaaataccattcggcgttgtttcgagcacagcgctgtcgtccatgcgaaagtcattaaagggaaagaaaccgaaggcgataaataccgcgattacttcgaatggagcgaaccgttacgacgttgtgcttcccataaaatcttagcggtgagacgaggagaaaatgaaggtattctcagagtttctattacccccgacgacgatacagcgatagaacggttacaacaaatatttatcaaaggctcaggagaaacgtcgaaccttgtcgataaagcgataaaagatagttataaaagacttctgcgcccttccatagaaagtgaattcgccgccgcctcaaaagaaaaggcagacaacgaagctatccgaatttttgcggaaaacgtgcgacaattacttttagcaccaccattaggacaaaaacgagtattagccatagacccgggattccgaaccggctgtaaagtagtttgtctcgacgctcagggaaatctattacacaacgaaaccatataccctcacccgcctcgtcaagattcggtaggagctgcacgcaaactcacacagctggtagaaagctacaaaatcgaagctatcgccatcggaaacggaactgccggacgggaaacggaacaattcgtcacaaacctccgttacgaccgcaagatacaggtcttcgtcgtcagcgaaagcggcgcatctatctattccgcctcaaaagtagctcgggaagaatttcccgaacacgatgtgacggtacgtggtgctgtatctatcggtcgcagactcatagatccgttagccgagttagtcaaaatcgacccgaaatctatcggggtaggacaatatcaacacgatgtcgaccaaaccaaactgaaaaaatcgctcgaccgaacgattgagttttgtgtaaactccgtgggagtaaacgtaaacaccgccagcaagcacctactcacttatatatcgggattaggccctcaactcgctcaaaacatagtcgattatcgcaaagagaacggagacttcgcccgaagaaccgacttgctcaaagtaccccgcatgggagccaaagcgttcgaacaagccgccgggttccttcgtattccccatgcacaaaatccactcgacaattctgccgtccacccggaacgatatcccatcgtagaaaaaatggcggacgatctgaactgcaccgtaagcgatctgatagaaaacaaagagctgaaaaaacagctcgacctcaaaaactacatatccggcgatgtgggtatgcccactctatccgacatcatcgccgaactcgacaagcccggccgggaccctcgccgttatatcgaaatgatggaattcgacgccaaagtcaaaacgatagacgacttacaagaaggaatgattctcaacggtatagtcaccaacattacccaattcggctgtttcgtcgacatcggtatcaaagaaaacggattggtacatatctcgcaaatggccgaccgatatatctccaatccgaccgagatcgtctctatgcaccaaccacttaaagtccgtgtcatcggtatcgaccgagaacggaaacgtatacaactctctctaaaagatgtgtcatgaatacagttttgatcagcctagcctcaaacacgcccgacaaactgcgacaaatgaataacgcatttgccgaattacaggaaatgggactcgttgccgcatcttcttctatttatgaaacggtagcttgcggaagcataaaaagccccaactacctcaatgccgtagttaaaatattcaccgatactgaccatcaagaactacataatgtcttaaaaacgatggagaaggcacacggccgtacccccgaatcgaaactttccggtaaaattccattagacatcgacatcgttgtctggaacggagaaataatccgtcctcaggactggaaacaagattacttccagacaggacttaaagaactggaacaaatgacttgaaaacctttctatacacttaatcgtttaactcaaaatatcattcattatgaaaacaatcgaagaaactttactgaaccgcacatcggtccgtcgctacgaatacgataagataccgtccgagacactcgatttcatctatcgagccatcgcgaataccccgacaagttacaacgggcaacaattctcagtaatagctatcgacgatcaatccattaaagaagagctctacgccattacaaaccaaaaacaaattaaaacttgcgccactttactggtattctgcgccgactatcataaaattgacatcttggcacaaaaaaagagaatcgacaatcctcatttcgagaatacgctcgacggcgttatggtaggaatcatcgatgctgccctagccatgcagaatgcggtagtagcagcccaagccgccggactcggtagctgctgcgtaggttatgctcgtacagccaatccggagaaaatagccgaaattctaaaattacccgaaggtacgtttgtcgtttgtgcactcacattgggcatacccagagaatcacccgacgtaaagcccaaacaaccgctatcattagtcatacaccacaatcattaccgtaccgacgacatggctcccgagctcgaataatacgaccaaaccatatccgaatataatcgccaccgcagcgggacgacctccgaaaacgactggtgcacccatattttagattattaccggatagctttgggctacgacatggaaggctatttgaacaaacaagggttcaaactcccgttctccgataagaaataataatattatatatactataatagggggaaagagaaaatcacaatcagatttttatgtatatctttgaagccgattacaataaaacggtttcaaagatatacgaatcatcaaacccatacttactatgaaaaccaaagccattctcagttccttattagtctgcatagtaacgacattatctgcccaaatcaatctcaacgattctacggtacaagttgtagcctattggtcgaaaggtgacagttacgattatctgtacgattattacaaatacaacatacagggcaaagacaccatatcgtgggaaagaaccatatccaagataaatatcacggttatcgactctaccgaaaacagctatacgctacaagccgtttatgatactcccaacgccattcgctctggttcggacagtataagccgagaactcacctctcgaataagccgtactttcggcaacgacacagtcatcgtcgagacaaacgaattgggcacgataaaacggcttgtcaatttcgacaaactgaggtctcgttacctgaaagccgccgaaatgacggccgaagcattgagcgcccaacaaggttccgaagcgcaaaaagattccctcttccggtttctcaaatccaccctgtccaaacagatgggcgacacgaccgtcgtagtatccaccgcactcgaagaactatcctttctactctactatcacggttgtaaaatggattttgacgaagaatatcaaatcgaagaaaatttcccatctcttctcggtggtgcaccctgtaaaggtatgagaacattttggatcgatgaagtcgatcccgaaaacgggtcctttcgcatagccagcgacgcaatagtaaataccgaccaagccataaagcaatttatagaactcatacagagcaatctacccgaagaagacaggagaaaaccgattgacagttctcaaattccgattattatggcccaagaccaaaacgacacttatatacacgccgataccggttggcctctcgtcgtctattacacccgaacgacacaagtaggcgaaaataaaagcggacaagaaatttctttggaaataaatatccccgaataatatatgacatataacaaaaaaaacgggcggttaagcgacatgtttacgctttttgtcgatactgttttggttctttataaaatttagatatatttgtatcacaattaattaatcgccccatgtaaatattacagactatttttttcgattaactattctatatattttggttatgtaacaattccgctgtgaagcggggttgttacttttttatcgcttcacaaaagaatccccaatttcacaaaaccaaaatatcggttcagtagaaatttagtggggatagacctgaattttagcaaatgagatgggttgcgttcctccttttcccctgccttgtcccgtagccttacgggaagtcgtgtagcaatatagaggagaggggttggaaagatttcataaactttttagctataagagttaacccctccgtccggcggacacctcccctatattttactgtgcaaaacacaggggaagaggcttaacaacagtctgttacatcgttttaacgaatgagataattgtatttacacttctcccctgtgtggcggtagccatataggggagacaccgaagaaacggcagtttctgagaagaggggttggaaagatttcatagactttttggctgtaagggtcacaccccgtcactgcgtgacaccactcctatatggctaacaaaacacctcgtaaggctacgggacacggcaggggagaaggacggactaagatgtctctgcgaaatttttttcctccctacctgcgaatataagagttaaaagacaatccccactaattatagactgagccggagtatctcgatgggactatccactaaatgacaagctccggcttcaatcaattcttcacggctccgaaatccccatgttacaccgaccgattcgaccccggcagccttcgcggtaaacatatctacatctgaatctcccacatacagggctttttccgcctcaacccccgacttatttagaatttcatatacaatatcgggagctggctttaccggaatgccgtcacgctgtcccaatacagatacgaaatcgattccggggaaaaaatactgtattaacttttgggttcctgcctgatatttattcgacgccacagctattttcacaccatgagaatttaaaacagacaataattcctccactttatcgtaagggcgagtataatcggtattatgtaccgagtaatattccaaaaaatagctcctcacacgagatacattatccgacgaacgacactcttccggcaaagctcgctcgaacaatttagttattccgttccctacaaaatgaaaatattcctcctccctatgttttggaaaaccgcaacgatgcaaagcatagttcgtactgatagccaaatcggcaatcgtgtttaacaaagtcccgtccaaatcaaaaataaccaactccttcatcttcttttattttacaaaatacaaaggtagtgtaaagcaaacgcagaaacaatcaaaattcacaaatccgaaatttaggacaattatatgcccattacgaccttgtgaagaatcacctcccgaaataactttgcccccatcttcaagaaaaaataaaacgatggaaaagagacacgacataaaaggtattctattcaatttctcaggtacaatcgataccgaggggagtgattggttcgacctcatttggaaagaatacagggaaatcgggatacctataaccaagagcgactatctggccgcccatgaatttgcagaaaaggaaatatccgaaaaaggactaatcgaaccctggtttaatttttattttaccttacataccaaactatcgcttcaaatcaaatatcttatttcaaaaggattattatccgacaatcgatgtactcaaaagtatgcccaacaactagccacgatttgttataacatggcgatcatgtatgtaagacaaaacgaaaaaacactcgaaaacttggtaaaacagtatcgtttgggaatcgtcgctcaatcatacggaaacctaccggctgttttggtagatttcggattggcctcctacttcaccgatgtcattgaatccagcatggtgaacctgagcaaacccgataaagaaatattccggttatcggtcaatgcgttacatatcgagccggaagaaactctatgcgtcagcaactctctaaacagcgacttattgccggcaaaagacatcggctgcaaaacagcatggctctgccaacgaacggttccccaagctaaaagagtttcgaactaccacatagcctctttaaaagaattgaataatctactatcctaaaactataatagtatacgccgaagattataacaaacttgttattacggcgcattctattacatgaagacaaatctaactgaaatattccggaaactgtgcgggagcatggtcgaggaaggctcttagcataaaaaagtgtattgacttgatggaaagccacagacgtgatgtctgaggcttttttcgtttcatacgcaaataaatcgaaccggctctcaaaatgcacaaacaaaatcttcctttaaaggattgtttatacagattattgctacctttgcaaaaaaattaaaaaaatactatttatctgcaatggattggattcaaaatctattattcaatgacgcctcggtagcccacaccgttatcctgtatgcatttgtcatcgcattgggtgtagccttaggaaagatgaaattcttcggcatttcattaggagtcacatttgtacttttcgtcggcttgattgccgggcacttcggtttttccgccgaaaaaaacatactccatttcgtacaggagtttgggctgattctattcatttattccattggactgcaagtaggaccgagttttttctcttcctttaaaaaaggaggactaaccctaaatatgctggctgtcggtattgtcatactcaacatagcggtcgctctcaccctctactttatacatcagggagaaataagtatgcccatgatggtaggtattctttcgggggctgtcacgaacacaccgggattaggagcagcgcaacaaacgctttcacagctcaaattcgacgggtccatttccgaggttccagaaatcgctctcggatatgcggccgcctatccgttgggagtaatcggaatcatcgcctccatgctggttatccgggcgattttcaaagttaaaatggaaaaagaaagtcgacaaatcgaagaagaaaaccaatcgagccaactcgtcccgcatgtcgttacttataaagtagaaaacaaacttatctttggcaggactctcgacgatttgaccaaactcatcgaccgtaattttgtagtatcgcgtattaaacataatgacgaagtaatcatacccaactcagatacgacactccaagaaggagacttgcttctcgttgtcctctctttacatgacgaaagcgcattggaagcatttataggtcgccccgtcgaaatgaactgggaagctattcctgcccctgtggtttctcgtcgaatactggttacccgccccgaattcaacggacggaagatcggaagcctacgtctcagaatgggataccggttgaatgcgacccgtgtaaaccgagccggtcttgatcttctagccaatcctaatctggaattacaaataggagaccgtcttaccgttgtaggacgaatcgaagacatcaatcgtttggccgagaaactcggtaactctacgaaacgcctccacgaacccaacatggtaacgctattcgtaggtatattcctcggtatcatattgggaagcattcctctcgccattccgggaatgagtgttcccatgaagttgggattagctgggggaccgctggtcgtcgcaattctcttgggccgtttcggtcataaaatacacctcgtcacttacacttcgaccggagccagtctcatgctacgggaaataggtatctgtcttttcttagccagtgtaggtatatcggcaggaggcgaattcgtcaacacgattatgtccggcggactcatttgggtatggtggggatttctcatcaccgtgattcctcttctcatcatcggaattattgcccgagcccactacaagatcaactattgctctatcatgggattgctttcaggagcttgtaccgatccccccgccctcgcctatggcaacaaggtatcggggaacgatgccccatcggtagcttactcgacggtttacccgctcgccatgttcctgcgggtgctttcggcacaactgcttattttacttttctattaaagttataaataacaaatatttagagaggaaaattccagtcggaattttcctcttcctttttacaaaaataaaaacatagaatactttacccgtttatcgataaaagaagacactttatccgcaaaaaaagggactctttctattacttttctttcatcatcggctaaatgttaaatttgaatcaaaatttaacgtatcgataatgaaaaaattaataatatccaccggagtccccctgcttctatgcagtactgctttatgggcacaagaaaaaataccctccacatggacattacaagactgtttcgaatacgcccgtgaccacagcatcaccctgcaacaaaaccgactgtccgtagaagaaagcgaggttaacaccaaagaggcaaaagctcaactttttccttcgttcgacttctcgacctcccataattacaataactatccgatggctgatggcagccggtcggggaaaaacgtctatacgggaacctacggaatcgacgcatcatggacaattttcgatgggaaacggcgaaacacgattaaagccaaccgaatacaagagaagcaacaacaatacgcattcaaagaaacactcgataatttgcaaatagaaatcctcaccgactacctccaaattctttatgccgaggaagccgtgaacatttgcaaacagacagtagaagtttcccttcgccaagtagaacgatctcgcgaattactggctgccggttctatttccaaaagcgatttggcccagctcgaagcccaatacagtaacgacaaataccaattagtcacagccgaagccaatcgagaccaattaaaactcgaactaaaacaattactcgagctcgacatcaatcaagagatgaatctggcaactcccgaaatcgacgaaagcaaagttctcgttcccctacccgataaaagcacggtctacactacggcattagggttcgtcccctccatacagagcggtaaattagaactcgaagtcgccgaactgaatatagcgaatgccaaagccggctactaccccaatctctccttgaatgccggtataggcagcggacacaatacagggaacaacgggagtttcgggactcaaatgaaacaaggattcaacgaatcggtagggctgacgctatccgtccctatatatagccgccgctctaacaaatcggctgtcgaacgggcaaaaattcaacaaaaaatcagccaattggatcttaaaaatcaagaaaaggatttgctgaaccaaatagaaaacgtatggctcgatgcttcgtccgcccaatcgaaataccttgcggcaaaagaacagctcaacgccacaaagacctcctacgaactcaccgaagaacagttctacctcggtatgaaaaatacggtcgagatgctcacggcgaaaaacaactggctgtcggctcaacaagaagaactgcaatcccgtttcatggctttgctcaatttgaaactactcgactattacgaaaacaaacctcttaccctcgactaactcaaactcgaatataaactgtcatcgaaatatgaaatcaaaaaaaatcatcatcgctaccgtatcgaccattgtcgccatcgccatactctggttctgtttcggcgggaagtcgaagagcgcgaactatattatcgaaacggctcaggctgtacgaggagacgtctcggaagccgtcacggcaaccggaacaatcgagccggtcacacaagtcgaagtcgggacacaagtatcgggtatcatcgacaaactgtatgccgactacaactccatcgtaaccaaaggacaactcatcgccgaaatggataaagtcactttgcaaagcgaactcacctcccagcaggccacgtacgacggagcaaaagccgaatatgaatatcaagaaaaaaactttttcagaaacaaggccctgcacgagaaacaactcatcagcgacaccgaatacgaagagtcgaaatacaactacgcaaaagctaaaagtaccttcgaaagcagcgaggcaaatctggctaaggctaaacgaaatttagcttatgccactattacttcgcctatcgacggcgtagtcatcagtcgggcggtcgaagagggacaaaccgtagctgccggattcgaaacgccgaccctctttaccattgctgccgacctgacccaaatgcaggttatagccgatgtcgatgaagccgatattggcggggtgcaagaggggcaaagagtcatattcaccgtcgacgcttaccccaacgacacgtttgagggaacagtcacacaagtgcgcttagaggccacggaagaaagcaatgtagtcacttacgaagtggttatctctgcccataatcccgatttgaaattaaaaccgggattaaccgccaacatcaccatttacaccgccgaacgccgcaatgtcgtgaatatactgctcaaagcccttcgattcgttcccgatccgccatcgggcaaaaaacgccacgaaccggaagatttgcctcaacaagaaatatccggaaacgacagcttgaaaatcgtttgggtacaagacgggcaagaatggaaacctcgtaaggtcgtcgtaggcatggacaatagcgtaaacgtcgaaatttgctccgggttggaagccggtgaaaccgtagccatagaccgcaaaagtaatataaacgctaccaatcgacaattatcggaagagaaagaagaaagcccgttcatgcccaaaccgccgggaaaaaagaaataatcaggaaaccgacatgacaacgaacgaaatcattcgattagaaaacataagacgcaattttatcgtagggagtgaaaccgtacatgctctgcgaggcgtcaatttcaccataaattccggtgagttcgtaaccattatgggaaccagcggctcgggaaaatccactctgctcaatatactcggctgcctcgacacccccacatcgggagagtattacctcgatggtatttcggttcggagtatgggtaagaacgaacggtcggttttgcgaaatcggaaaatcgggttcgtatttcaatcctacaacttgttgcccaaaacgaccgccctcgaaaatgtggaattacccctcatgtacaactcctccatctcggccaaagaaaggcacaaactggcatcgaaagctcttgatgccgttggactgtccgagcgaaaaaatcataaatccaaccaaatgtcgggagggcaacaacagcgggtagcgatagctcgcgcattggttaacgaccctgtaatcattcttgccgacgaagccacaggaaaccttgacacccggacttcattcgaaattttggttctctttcaggaactgcatgcccggggacgtaccattatctttgtgacccacaatcctgaattatcggcatacagtagccgaaacatcgtattacgggacgggaaagtaatctccgatacacggaacgaaaaacaagcatcggctttggaaatgctgcaaaaactaccggtggaaaccgactaaggaataatattatgaatctgaccaatctgactaaaatagctctaaaagcgctcaataacaataagctacgttgcttcctcaccatgttgggtatcatcatcggcgtggcatccgtcatcacgatgctggccatcggacaaggttcgaaacgaagcatacgagaacaaatctcagaaatgggttcaaacatgatcatgatacaccccggcaacatggaaagagggggtgtaaggcaagacgcatcgtctatgcaaacactcaaattaaacgattataaatccatctccgaacaagctgaatacgtgtcggcttgttccccctcggtaaacagcagcggacaattcatatatggagcgaacaactatcccagtacgatatacggtattaccgaagattatctggatattcgtaaaatttctttggaagagggaagcatgttcactccacaagacgtcatcacttctgccaaagtctgtttaatcgggaaaaccattaccgacaatctcttccccaatggagaaagcccgattggaaaagtaatccggttcaataaaattccccttaaagtcataggtactctcacgcccaaaggatacaacagcatgggtatggaccaagacgatatggtactcgcaccgtatactacggtacagaaacgcattctcgccattacctacttgcaaggtatctactgttcggcattgtcggaagaacttacccctcaggcaaccgaagaaatcagcgagattctacggaaaaaccataaaataaaagaaggagaagatgatgatttcgaaatacgttcacaagaagaactaagttccatgttaagctcgacaaccgacatgatgacaatcttgctcgcctgcattgcaggtatatcgttattagtcggaggtatcggaatcatgaatatcatgtatgtctccgtaacggaacgcactcgggaaatagggttgcgcatgtccatcggagccagaggtatcgatatcctcgcccaattccttatcgaagctgttctcattagcgttaccggcggcattatcggggtcgtcttcggagtaggtgcatcggtaatcgtcaacgtcctgttcaaatggcctgtctacgtacaagcctattcggtcatactttctttcttcgtttgtacgataaccgggatattcttcggttggtatccggctcgtaaagccgctaatctcgatcccatcgaagcgattcgctacgaataatttcacttttacctttcaaatgaatatatttgtacaatggcatccgataagctacatctaagtaaaaaatggaataccgtctttatacatctggcggcatggagtatcttgtttatttttccactcttgtttatcgaacgattcgggaacatcaaccgaatgcacaatttcagcctgataaaattttatatccaaccgatttgcatagcctgtattttttacatcaactacttatggctcatcgataaagtcctgtttcgtaaaaaaaccatacgattcattctctacaatttattactggtagtcatggccaatatagctatctatttggtacaccgcatggtcattcccgaaagcattctgcatcaaagacccactcccattccccctcctcgcccagggttcatgcaatggcaagattccattacactggttctggtcgttgggctgagtgccgctattaaagtcactcaaaaatggatcacaaccgaaaaagaacgtaagcagttggaacaggaacgtaccgaagcagaattgaaaaatttgaaaaatcaactcaatcctcattttctattcaatacgctcaacaatatctactcgcttatcgctatcagtcccgaacgggcccaaagcgcagttcttgaactgagcaagttgttgcgttacgtcctctacgaaaatacacagccctatgttcctatggaaaaagaactggaattcaaccataactacatcgagctcatgcgattgaggcttgcccgccacgtccaagtagatgtaaatattcctaccggcttgtgtcgagggtataaaatagcaccgttgcttttcatcacactcatcgagaatgctttcaaacacgggaccagcgcatctacccgatctttcgtaaaaatcaatatgtccgaaccttcaccgggagttatcgaatgcgatatagaaaacagcagcttcccgaaaaatgaaaccgacaagagcggttcaggtatcggactaaaaaatctatcccgacaactcgaacttctatacccgggaaaatataatctgcatgccgagagcgattcgcacatctaccgctccatgttgactatcgacctgaattaaataaacactgcgactatgatattgaaatgttgtattatcgacgatgaaccccttgcaatcgagctactggaaagctatgtcaagaaaacgccttttctacaattggaggcttcgtttacctcggctgttcaagcgatcgaaagaatctcgaaaggagatatagatttgatatttctcgatatacaaatgcccgagctggacggtatggaattttcccgcatgatagaagggaaaagccgtgtcattttcactacggcattcggacaatatgccgtagacagttataaagtcaacgccgtcgattatttgttgaaaccttttgcctacaccgatttcctgaaagcggcacaaaaagcgttgcaatggttcgaattatcgtccgggacgggtgaaatgcattccccagacaaatcatatatctttgtaaaaagcgattataaacttaaacagattcccctcgataaagtactctatatcgaagggctgaaagattatgtaaaaatttacctcgaagacgaaccgcaccccattctttccctgcttagcttgaaatccctcgaagagatgttacccgatagtcggttcattcgggtgcaccggtcgttcatcgtgcagggctgtaaaatcaaaatgatcgatcgcaaccgaatcgtatttggcaaagaatacattcctatctcagatacttacaaagattctttcgccgaatttatctcccgccacactccgctatccaacaaatagaacgagagacataagtcttgttcgacccatgcctctcgctcgttacttaaatttatttcagttttaggaagcatcataaatcctgcgcagaaaggaacccaactgtccgacacacaacccgcaagccacagacaatcccatgtaagccaaccaagtgtgtgcacaagtccaacaaggattgtaaatcatttctttggcaaatatcaagcatagaaccgtacaaattgcaataacaagtaccgaaacgacaaatgaaattttggcttctatgctccatcgcttgcgaggcagtctattcaacaccctacgcgtgaaccacttatctgtccgaagttccaacgaatgatcgccgaaaaactcccgccactgattgtcattccattcattcatatccgtttttctttaaatattcacccaatttttgttttgcacgaaataaatgcgactttaccgtaccttccgatatactcataatctctgctatctttgccacggcaagatcctcgacgaagaataaagttatcgccgttcgctcctcggggcgtaaaatagacaaagctcgcgatacatcgatattccggtccacacactcaggaggttgctccaacagattggccgcctcgtccacagaagcatcttcccattcccggctctttcgtaactcatcgtaaaacacattgtaagctactcgataaatccatgtcgaaaaagaagacaagcctttataactacgcaaattataataaactttgataaaagtctcctgcgccaaatcatcgctgagcactggatctccaccggtaagattcaggaaaaagcgtttcaatcgcacctgatacttatcgacaaggcaggcaaaagcccgccgatcgtcgaacaaagcacaacgagtcacccacgctatatcctcgttcttattcatcgctccggcctactcgatttcggtagtttgctcatcggtatcacgaacttcctttcgcgattctacccgataaagaatcagtttccctatacctatcaaagtgaatatggccgccaaaccaaccaaaagagccccgaaaccttcgtccaattcataagccccacctatacaccatataaaagacccgattccgacagccgtacaaacaagaccttgattcagagtggaaaatttactgggtcgcttcgactccggttcgtcgaaaaagccttcgggtaattctcgacccgactctatcgctttttccatcacccgatagcgggattgtacttttttattacgataataaatatagaaaaagacaattaaaaaagcgataagaaaaggtgaaacaatagcaaaaagaggaaccaaagagtctattatatcctcggcatccggctcatcttgaaagagcgttctatcccgttcaaattcgagttccttcatacgtatttgaaaagcctcgctcggagtcataccgttaagtgtatcggctgctacgaccgcttcttgttgtgccacagggccattcgatttcagaggagctgttgcctcggttgctgttacggctcctgtccacgatacgatagacaaaagcatcatcataaacatctttttcatattctcttctattttaattttataggttatttatagtcgttctctttccggaaattcaatcattagacgtaaccaaccactcgtttggttgcagaaaccttgaattttttttcaaaaatagtctaaatgaaggaacggcacacattatctgcatgaaaatgagattaaagaatgttctctctttctgttgctcccgtatcattgcaaaatggaatatcgacgacataaaagagatgaaactaatcgacagaaagattcattaaaagaaggcaaaggaattacccaaaagggaagtacatattttataagcgaacttataaaataccttgcataaagaaaatcgaaacaaaacggacaacaagcgggtaaaaaaagtaattttgcatacctaaactaaacaaaggattcatgaaacaaaaagaaatcaataaagtcgaaatacgcaatcttcaaaaagaagattacgaccaactggctagctctttcacccgtgtctatgccgacggtagcgacgtattttggactcctgaacaaatcgacaaactcattcgcatattccccgaaggacaaatcgtcacggttgtcgatgataaaatcgtgggctgtgccctctctatcatcgtaaactataacgatgtaaagaacgaccacacctatgcccaagtcacaggaaacgaaacattcgacactcacacgcggaaggggaatatcctgtatggtatcgaagtgttcatacaccccgattatcggggtctacgtctcgcccgacgtatgtacgaatatcgcaaagagttatgtgaaaagctcaatctgaaagcgatcatgttcggcggacgtttgccgaattaccacaaatacgccgaccgaatgcgccccaaagaatacatcgacaaggtgcgtcaacgcgagatattcgacccggtgctattgttccaactctccaacgatttccacgtccgtaaggtaatgcgaaactatttgcccaacgacgaggaatcgaaacacttcgcctgtctgctccaatgggacaacatctactatcaagagcctaccgaagaatatatatctcctaagaccaccgtgcgggtaggcctcgtacaatggcaaatgcgtagttacaaaacactcgacgatcttttcgagcaagtggaatttttcgtcgattccgtaagcggttatcaaagcgacttcgtcctctttccagagtatttcaacgccccgctcatggctcggttcaacgatgcgagcgaatcgcaggctatcagaggattagcccgatataccgacgaaatacgagaacgtttcatcaatcttgcaattcggtacaacatcaacatcattacaggaagtatgccgctgattaaagaagacggactgctctacaacgtaggtttcttatgccgtcgagacggtacctacgaaatgtatgaaaaactacatgtcacccccgacgaaatgaaatgctggggattgagcggcggtaaagccattcggactttcgagaccgactgcgccaaaatcggagtcttgatttgttacgatgtcgagttccccgaactctcccgaatcatggccagcgaaggtatgcaaatattgttcgttccgttcctcaccgatacccaaaacgcctattcccgtgtaagagtctgcgcacatgcccgtgccatcgagaacgaatgcttcgtagtcatagccggtagcgtaggcaacctgcccaaagtacacaacatggatattcaatatgcccaatcgggagtttttaccccctgtgatttcgcattcccgacagacggacgcagagccgaggctaccccgaacaccgaaatgattcttatatcggacgtcgatttggatcttttgaacgaattgcacacctacggtagcgtgcgcaacctcaaagatcgccgcaacgatctctatgaagtgagaatgaagaaataacagaaacgaaaacggtctcttaaatattcaagagaccgttttcatcgagcggcaaacgagactcgaactcgcgaccctcagcttgggaagctgatgctctaccaactgagctactaccgcagtttttcatttcttattacggggacaaatgtagaagttttttttctactttacaaattattgccgtatttttaccacatagaaaaatcataaaaacgatatggtaaaaattggtttgttgtccgacacccatgcatggtgggacgaccgttacgaaaaatattttgccgaatgtgacgaaatctggcacgccggagatataggctcagttcaagtcgccgaccggttcgaagccttgaaaccatttcgggcggtatacgggaacatcgacggtcaagagttacggattcgctatcctcagcaccaacgtttcagcatcgaaaataccgatatatggataacacacatagggggctatccgggccgatatgcacgcgaagtgaccccggaaatatacatacaccctccccaattattcatatcgggtcactcgcatatcttgaaagttctttatgacaaaaccctacactgcctgcacatcaatccgggagccgcaggaatgtacggattccacaagaaacgtacattggtacgcttcgccatcgataagggagaatttaaggatttggaagttatcgaactagctgataatcgataagtacaaaaatcaaatattcaactcctgacgaacggtttcgataaattcccaaaataccgaagcgaaaggttcgataatagagcgtttcggttcacccgagggaatgagtgcatgcaatccacctttgaaacaacgcacatctatgcgggttcccatctctatgggctctccgtcgaggtgtatcgcaccgggcttttcccttttaatcgtaagcgattcggtcgtgaagctcttgatattggaatcttgatcgatatgtttggtaaataacaaaagagccaatgcagccgtatcgaacggggtaaagggcataagcaccgtgacatcgattttcccgtcctgcatgctggcatgaggggctatataagcattattaccatattgcgaggcattgccgcaggcaatcaagaaagccttttcggtcaccgtcccgtcaggcatttcgatttgataagtttccgatttatatttgagatactccgtaagagccttagccacatacgacaattttcctcggcgttttccttgcgcgaatttcaagctcaccaatgcatcgaagccgaccccgcaagtgcagaaaaaagggcgatcgtttgccgtacaataatccaaatccacgatctgcccgtcgttgataatttcgagagcttttcgcacgtccatcgatatacccaaatggcgggcaagcccattgcccgaacctaccggaacaatagccaatgccgtggaagtatcgataagctcccgggctatttcgttgcaagttccgtctccgcctacggacagcacgatgtccacactttcgtccacggcccggcgagtcaattcggctccatgccccgcatactgtgtaaaaacacattccacccgatatttcgaagggtctattacttcccttatcagagcagggatttcttccttatcttttgttcccgatataggatttataatagctaagagtcttttcggtgcagacatagaattttctgttttcgaaaaagcataggcaaaacccgtacatggaatgaatacaagacattcgaacaatcccgattcatcgaaacttaacggcccgattgccatagcgggtgacaaaggtacgaatttttcccaaacttttacaaacctataacacgcttccgactttacgttataaactaaatgataaaatggacaacaaaaaactcgtatttctcaaacaacttagtacctttgtagaagataggagtctttgggtagaaccaaatcggaaatacgatttccgtttgtctccgagcccaccattcactatatttgtagaatataggctgcggttcgacatagtcaagtttgaaataaaatttcctattgactttgcactaacctttcactatatttgttggtacgaaaataggatgcggttcggcatagcccaaacagaaataaaatttccgtttgtctctgcgctcacctttcactatatttgttgtttataatataaagcgaacattaactaaaaaagatatattccatgaatgcttttcaaaacccattaatacgtattatagcctctatcgccgtaggcttgttactcattttatatccgaacgccgctctgcctacgattcttttaatcatcggtattctcatcggattacccagtctatacgctctcctcgtttatctattgagcgaggatagaaataagttacccttccccgttttatccttagtgatgttgctgttcggttgtacgcttatgctgtttcccggctggtatataggcattacggtatatgttttgggtggagcgctggtattgataggagtttatcaaatactctatctgctgacacttaaaaaaaatctgaggagcaaagcgggttggctctcctatctgttaccggctatcgttctgctcatcggcatagaaattttggtcaatccgttctcggcgaccgagagggttatggtgattactttcggagcggcaacacttctttacggtatcactgacctgatttactatatccggttaaaataaattccgtaaaaattatttctcaaaaatctatggaaagcctcagatttatctgacggcgagtaaggtaattgggcacggcatattgcgcattggtaatatccgtcacccaatagtacgaattcacattacttatatcgaacaggttaaagacatctattcctatccacacgcttttcaaatgacgtaaaacgcctttctgcaaaagtttatcttcgcctccgaccaaaatacgggaagctcctatatcgacacgcttatatgccggagcacggaaataacctgcctgtcggcctttccgaggcgaacccaccggcaaaccgtcggcaaaaatagcccgtagactgaatttatacttcgggaaccgaggtacataatcttgaaaataaagccccacactatatcgttggtcggtaggtcgaggtaatttcacgccattgatttcctcctgtgtcttcatcagagagaacgtaagccacgagtcgacgccgggcacgaactgcccgaagagtttcatatccaatccggcggcataccctttcgcctcgttctgcccgctgtaccacacccgcagattatccacttcataaggaataagatggtcgagtttcttataatacaactctgccgtaaatttaaaaggtctgtccaatgcccggaacgaataatctccacccagtaccacatggatagaacgttgagacttgatattccgattgagctgcacgacataattattagcggcatcacaaaccgtgtcgcgcaactccttataaaaaggagcttgataataaagcccgccggccagacgagtcgttatctgttcgttggcagccggaataaaagagatcgacgcacgaggactgacaagggtctccttgttgaacccccaataagaagccctcaatccgccggtgaagataaagcgcccccacaaagtacgtaaccggtaggtatcttgcaaataggccgacaaacgatggctctccatatcttgtcgggaaaacaaattataaatcatctcgaccgattgccccgtatgcggcaaagaatagcccgccgaatctcgcatctcccattccctcactcggtcgtgtatcttttcgtattgatgggtcaatccccacttcaactcgttctgtcccaatttcgtagcacctttcaatgaagtagccaccaccgatgctctcaaccggttacgagcatgctcgtgataagtccccactccaagagctcccttattctcagtcgactcgccgtcctcgccattagccaaatcgtccaaccaatactgcccggcaatatcgtaagtcaccagttcgttcgtgacgaaagccgaggtcatcaaagcccattgagtatatttatcggggaaaaaattcaacgaaaaagcaccgaaataagtctcgaacttatctttttcgtagccgtcgaaatagactttaaactgtttggcatcggtcgccgtaccgaatgacgtattccgctcgtggggagtaaatttataattgttaatggaaatattgcccagcaaagaagcctcccacttcggtgcgaatttataagtaagataagtttgataatcgaaaaaagaaggctcgtattctcctttggtatcgagagaactcaacaaagtagaattggttttataacgcacgccgtgcaattgcgagaatttcttggtgctctgtcctaccgaagcggtagcccctaaaaaactggcggacaccgatccttcgaacgcttcgggatgcttgtaaataatatcgagcaccgacgacatcttgtcgccatattcggccgaaaatccgcccgacgaaaatcctacggcccctaccatatcagggttgatgatactcaacccctcctgttgccccgaacggacagtcaacggccgatagacctctataccgttgatatacacgatattttcatcaaaattaccccctcgcacggaatattgcgaactcagctcgttactcgaattgacaccggcaaaagttgtcaacatagcctcaatactcccccccgtcgcatcgggcatcaatttcaaatccttcgtgtcgatcgtctgcaacgtactcgtctgccggcgatgagtcgccacgacaacctcgttcaacatcttggcgttcttgctcagacgcaccgacaaggaaacatctttcgtgagattgagcaactggcggcgctcttcccgataccccaaacaggaataaatcaccacgatggaatctcctgccggaatggaaagctgatactcccctttcaaatcggtcatcgttcccatcgtcgttcctgccacacgcaccgtagccaactctatgggctgattgtcactgtcatacacacgtcctgtcagcttcacacgcccctgtgccgccaactgaaaaaccgcgcctatcgtgataaaaaggaataatatcttgtatctcatcgggattctatacacactgtgcctctttcgtcgaaggcacatttattaaacgggaaaaaactccgttcagtatacggccggacgaaaagtatcaaaaaaagtttctaccattaaccgtagaacaacaaggttattgtatctttgctatgtaaagatgatttgtatggtgataaaaagggtctttactctttcaaacaaatcaaaatggataaatttcataacaaacttagaacctctatccttatgaaaagcctgcacgacttgttgattcatcggcggagtatccgcaaatacacccaagaggcgctatcgcccgaagccgtaaaaaccattctcgaagcgggattgctcgctccttcgtccaaacgctgcactccgtgggagttcattgcggtggaagacaaagaaacgctcgcccggttgtccgaatgtaagacttcgggagccaaacccattgccggagctgcactcgctatcgtcgtcaccgccgacatgacccttaccgatacgtggatcgaggatgcttctatcgctgccattctcatgcagttgcaagccgccgacctcggtttgggaagctgctggatacaggtgcggggacgattcggagctatggacgaacctgccgaggattttgtgcgggagacattgggaatccccgaagagatgggagtgctctgcattctctccattggacataaagacgaagagcgcaagcctttcgacgaagaaaaaatgatgtgggaaaaagttcacatcggcaaatggtaatcccctgcatcgacatgaagattattctcatcggagccggtaatttagctacgcaattagcggtcgctttacaaaaaaagggaatgactccggcttatatatacagtcgtacccgagaatcggccgaacaactgagcgaacgattgcgcgatgtaccctattccaccgacatcagccgagtccccaccgacggcgatctctatatcttcgccgtgaaagactccgctctgctcgatttggtttcccgcatgccctccaatcgaggcctttgggtacacacggcgggaagcatggacatggaagtgttcgccccgtataccgcacggtacggtgtattctaccccatgcagacattcagcaaagaacgggaaaccgacttcgacgatattcctatttttgtcgaaacgaaccatacggacgataccgaacgtttgcaaaaattggcaggtcggttatcgacaaaggtttacgaagcgacctccgaacagcgcaagtacctgcatttggctgccgtgttcgcctgcaacttctccaatcacctctacgccttgtgcgaccgcattctgtcggaacacgggctgccgttcgagaccatgctgccgctcatacgggagactgccgcgaaagtagccgacatgccgccggcacaagctcagaccggaccggcaatccgatacgacaaaaacgtcatagacaagcaaatggctctgctttcagacccgaccatgcggcagatttacgacctgatgagccggagtattcacgaaaccaacaaacattaaaaacaacgactatgagccgaaccgatttcgacctctcacgaataaaggctttcgccttcgatgtggacggtgtcctttctcccgatacgatccccctgcatccatcgggcgaacccatgcggatcgtcaacatcaaagacgggtacgccttgcagttcgccgccaaaatgggctaccccatcgccattattaccggcggacgcaccgaggctgtccgcaaacgttttgaaggattaggattaaaccatgtctatatgggagccgccgtaaaaatcgaaattttcaaaaaatggctggacgagtgcgggctgcgtcccgacgaagtcatgtatatgggcgacgacattcccgactacgaggtcatgcagatagccggtctgccggcttgtcccgccgatgccgcccccgaaattaaacagatagcccgctacatctcgccgttcggcggcggacaaggttgtgggcgggacatcatcgaacaaatcctgagggcacaaggcaaatggatatccgataaaacagccttcggctggtaaccacacaaaacaacgaaacaccatgctatcgcatctcaaaaaatacgaaattctgttggcgagcaattcaccccgccgccgggaacttctcgccggattagacatcgactatcgggtaacagcccttcccgaagtggacgaatcctaccccgacaccctttcgggcgaagagattcccctctacatctcgcaagaaaaagcagccgcctaccgccgctttatgaaggataatacgctccttattactgccgacaccatcgtctggctcgatgggaaagtatacggcaagccccacgatattgccgatgccaaagccatgttgcaagccctgtcgggaaaaacccacaccgtcatcaccggtgtcacgctcacctctctgcaaaaacagatctccttcgccgtctccaccgaagtcactttcgccgccctcggtgacgatgaaatcgattactacgtggagacgtaccgccccctcgacaaagccggagcatacggcgtacaagaatggataggctacatcggcgtgaccggactcaaaggcagctattacaacgtgatgggattgcctatacaacgactgtacaccgaattaaaaaaattttagaagctgttttaaatttattccgagacaggggctcaatctgtctcggaataaatttaaaacagcatccaatatctcccgtcgatatcatttatatggagaagcccagaaccacgactcattcgaagtactccaccgtttatcgtaaggttcgcccgtcggagacagcgtgatgtacacaggacgccgtttcccctcgacataggtttcattgttaaagccactgcaatcggaacattgcagataataaaggtttttgctcatgtaataatccaaataataatcgttggtacacggagttttatgattccagttagcgtcctcgttaaccgtcacgaactcaccttttttcaatcggtctctgacctccgatatactcaacaaattacctttatcgtccatgacataggcattccatgtggggtctacccacaaccacttgtcgagagtgttggaataaacgacgttgatcacatggcaatcgtttatatagcttttcggaagacaagtcacatagcgggacttgaatcccatagccaaataacactcgttcaacatctgtgccatcatacggcaattaacgcccctctcctccttcttgcaaatttcatatagagctatcgcatttttctcttcgggattataagacgaaccgtcgtgacgaatcgtattgtgtacccacgccaacagattttttatcttggatatttcgtcaccggctcccgcaatactgtccaagttgaaatatcggcgcacccgtaccaaatcgcggtcgttggggttcatatatgtaaatgccgacaaagagtcggtagatgcagcatcgtcataccccggtgattttcggagtatatatccgaaatcgcctacctcacgcagacgctccatcgccttctgaaaacgtttatcgtctctcacgttatccaaatcggtatctttttgggcatgggcataatcgtaataaccgtattgaatagctttctcaaaggcatcgaccgccgcttttttccgtttcatcaaggattcgcagcaagccacattgtaatatgtgtcgataaaacaccacgaacactgtttcaagacagaatctggcacagattcacaagttttgaggaactgtcgatatgttttcaatatcaacttatggtccttccaatttttctgaatgacaggagtcacactccggctaaaatagacttgcacactatcggcattccaatcggattccgcagccacaccgctgaaacagaaggacaaaaacgctatccataaaaactttttcataaacattaatttttaagtatattaaagagacggaaaagtactaaaaacataacacagactcttaataaattaagaaaggataacattataataatattataaaaaatatcgaaagaaggtatgccaaaactcaattttaccaaagatttttaaattgaaatttgagcctcccaaaaagaaaagaagagccgtatcaaactctgtttcgagtaatgatacggctctttcagattctgtaattacaatccgcaacttttaccctccccttaggaaccaccgtcaaacctcctcaacctgtattctgaaaaataagaaaatcaaccattaggccagcaggagatttatgttccgttatcaagtgtagctttttcaccctcctcccctgtgttttgtatgtaaaatataggggaggtggccgaaagacggaggggttagaaagaaatcaaaagcacgggaaaacacccgcctttatcgggcggtgaagtcgcaagggagacggaggaaaaatggcgaggactgtccgagcggagcgagttccacagaccccgacggcgaccgaggcaataagccgaaaagcccgataactgcggcggcgcttcttggttcgttcttctcgctgttgagaagaatgaacaaataaacaacctttcaacccctctcctcagaaactaccgtttcttcggtgtctcccctattgctaatgcaacaggggagaagtgcacaatgctatccttaatccttatacgaaactgaaatgacactttcaaacctctcccccctgccgtgtcccgtagacttacggggtgttttgtacgcaaaatataggggaggtggcacgtagtgacggaggggttaaaccatacaatgttacccaactatctcttcacacccttaacgaccgtgatttcatgtttcccgacgacccgaataaaatacgttcccggagcccacgccgaagcatctacggtcacaagacgagcttgcgaatcgacatgctgtcgatacacctcccgaccgccttcgtccaacacggaaatacttcgggtattctcaggaacacgtacaataaattcggagttgaaaacagacggataaatagaagccttctcttccgtaactttctctatcgaactgactccgttcacattctgagtgactttgatgtcataagtcgaaatactatccgagaccgtgagcgtagcgacacgttcctcaataccgtccggcaaacggtcataggaaatttgcaaggtatccaatgtcaagccattcggcttgcccacgacccgacaccactcggcatcactccgaataggagtttcataaccgtatatcgaatagaacggatatttaaccgtgccggctgccttacccaccaccagcggttcacggtctaccggcataggcgacataaccgaatgaacgatcgaaggcataatcatataagaagtatgattcgctcctgcggggaaataggtgctcacgtctcgccactctccatctttcaacatataagccgtgttaccgtgatcccggaaatcggccatagcgaacgacacatctacactgtcgttcttctcgggaataccgtccactacaatgaaaaactcgtcgtcgatcaccgtcgggtcaaattcaaattccgtagcggtcaatgaactgcccgaaggggtttccaattcgaataccctccaccacatcgagtcgagtttcttgcccggcaatccgttctcgctggtatacagatgcacgcccacatcggcaatctggtcggttatactcgcagccgaagcactcacaaaataaacataagctccgaataccaatatcggacgggacggtttggaaaacttctcagcataagcagtaatattcaatttattcgtcccggggaaagttcctctatcttccaaatcgaacgtcgcagccctatctcccggctctaaattcgtaattaacccactgtactcgaccgacacctctacggtatcgttcgattcgccatgttcgttctccacacgcagactcaccccttgtttatgcatatagctatatcctacgatagggttttcttcgtgcgacgtcacccgggcatacggttcgggatcgacaccgtcgaaagtccactcccacgaagtaggataattggtcgaattgtcccgatactgcacccccaccagcggagctaccatcggcaaacgcgtttcgctgaaccggaatgtagctggtggtaatatctgcgcaagcggtgcggatccggtaaccttcacgaatcccgtgcgggtcttcgtatcgctcccatcggcattacttaccgtcaacgtcacatcgtaaacgccgtctcgcgtatagaacactcggggattctggtcggtcgatatcgacggcgttccgcccgggaacgaccattgccatgccgtaggcgaacccgaggacatatcggcgaaagcaatcacctcgcccgtggctgcctcgacttgttctacggtcgatactccggtaatttttaaaccgtcgatagcgaaatcgcccatataaccaccggttccgaacgaatcgttttttccgggaccatacgtaaaacgaatctgaatcttctgaccggaatatttctccaaagaaaccgaaaactcatgccaacgccacggcttctctccgtcctcgtcggcgctattccaaagaatttccgaagtctcaaaagcatctgccgaaacagaaatctgcaagcgacagtaatcgtccatattttgggtaaaccctatatatcctttcaacatagcatttgcaggaacatcgatctgcccacttgtcgccatagcgattcctcgtttgaaagactgataagggccctctatatacaacgattgaacatcgtctggatcataagtagaaaaatctctactggggtcagtcgtactcgtgatttttttcacagtccacgaaaaatcctcggcattggtaattgtccagccatctgttccgtcgtcaaaatcctcttcccatacagttacagcgctgccagcactctgacaactaaaatcggcagtcacactcgccgcagccgattgaaacaaattcggtccctgttttttccccacgaattgaatacggggagcttctttcgtagcgaccttatcgtgaactctctcattcatcggccgctgagcgctcatcggtatactcacccaaagagcacctgttaagattaggcttgaaataaaacttttcatacacttcctatttattatttgataaattttatctgtatcgttttcccttcttcggtcacgacatgagcgatataaagtccggccggaagttgggacaaatccattcgtccgctttccgattcacaagacactaccgttacccctgccgcattgataatttgaatatcgccacccttgtcaaaaactaacgaatggttactacgatcgaaataaacttcattcatacactccaaaccatcgataccggaaatgacattactgataatcgaacatgaacttatatacaatccccacggatcccgggtagtagcatgtaaaccgatataccagatcccgtctgacggaacactgaaatctactgtataaagttccgacaaagtcgaattgatttccgggtacgaagcgatcaccgtttggctttcaccgggtagaacatcactgcccaatgtcacttcaatggactcaggataacgatatttctctgcccgggccctaaattcaagcgtatgcgaacccttcttagcttcgaacggcggcgtaaacaaccagtcgtcggcagccgaataggccgtatatttcatctccttctcagtagcatcatatacccaacttttcgtatcgttattggcatcgacgatagtccataaagccatctcatcggcgctatccatactcgtctcgtacggaagtcccaatgcactgccgaataccaatgcattcgaggttaccgactcgctttccatatcgcccgacagcgtcgttaccgtatagcgatacaaagccaaagaaaggtcatcgctatcgacataaaccgtatcggtcaaactttccgtcaacatctcgctcccgggatcacggacgattctgtatctcaaattctccacatcgatatatccgccattcacaccctctgcgggagctctaaaagtaacttgcggtttaccttccacatcggtcaattccacatcagttaccgatttcggagtatctgcacctatccaagccgattccaccacggcggcctcaccggcattctcctcgacataaccgatgactctatattcatatttgcccggagcaggcacatcttcatcgatcacctgttccgaacctccttttatcggatcttcttgtgtataaataagagtttcgccccgatacaactccattttcgtcaacatcggcagttgcgtaccggcagccgaaagagaaggattggtccatgcaaccgtggcagacatagcgccctgttcaccgggagcgacggtcaaatcggaaacgacggccgggacaaccactgtttcgtccaccgacaggtcatcgatgaatatagcataccaattggtctgtccgtaacaatggaaacctatatggtatccacccgactcggaaacagaaaagacaacctctttctcttccatcaaagcagactgaattgtatcccggaacaatcgggtagattgagcttccgccgtggcggcccgaccaatcgtcacgctcaaatccttataactttcctcagaagccgcattttcaagcccagttttgaaaagtagtttataattcttcccggccaccaaattcaatttaggcgtaataagccactcatcggcatcactaccgccccaatactgaaccatttttttcgagctatcatatttccaagtcgaattatccccgttggcactcagtatagtaaacaaatcgagcgatgattcggtatcaaaactctcgctatacggtaattctttcgctcctccggcaacaaccttattggaagcgaccgatacgctcgctttaccatcgaacattgcgacgaccgtataaacataactgcccaattccgggacttcatcgatatatgggaatggtcccgaaaaactttcggacaagacaccacccggggtacggccgatttcatacgtaagcgccccggtatcgatatatccaccgttctttccgactgtcggtggcgtaaacgaaaggctcacagtcgcatcttctgccaaagccaccaaatcggtaactgccgcaggagtatcattccctatccacggggaagtaacggtcgttgctgagccctgagaatccccgaacgtattataagcgaccactttatatgtataatttccggctgtctcgatagaagaatctatccaaccagcttttcctcccacagtagccgtatcgagagtagcgaccaaatctgtcccccgatatattttagcgcccaagaggttcgaaagcgcaccgcccaaatggtcggacgaaggccatgtccatgaaagagtcgccgacatcgctcccctctcccccgcaacgatagaaaggtctgtaatttgtaccggataaacgggagcctcttcgataacgatcttctggaaatagagatcgccattatacgattcgctgtaacaacgcaatcccacataaaaaacaccgctctccgccggtgaaaacgtccccgatttttccacgaacaatctactttgaaaagattcgtcataaaccaaccaggtcgtcagcccttctaccgtaggcgccgtccctattttcaattctattttttgtttatccgaaccaaatgtagaagaatgcttcacataagccgacaccttataggctttcccggcttcgagggtcaccgccggagcgattagccaatcatcggcggcattactcttatcttgcgtatacatcgcattgccatcgttataggcccacgtattggcacttacgtcgctattgacatcgatcactgtccaatcacgagcaaaagtctcggcatcggttatttccaacgtacaaggaggaacagtctgagcccaccctaccgaaaaacaatagaaaagaaaaagaacagaagtaatttttttcatagctattctattttaattaatatgaagaaaaagcatcttttattcaaaaactatcgaaatgccatctcgaatgcaaagtctctctattctcccactcctaaaaacaggcaaccgaaaacaacgaaaattgagttttacatagtcgaatttaatcttatctatatgcaaatataatattattattttacaatctgcaatcattctttgattattttttttaaaaaatataacaatcatctccttttaaaaaaatatgacaacattcatcggcattttgcgacaaatgggaaaagcccgatattcgtataaatcgagggcgtaagcaatccgacagggaaaacaaatacatttgttcgataaagtctcttccctttttccgtatctttgccccataaaaaaaacggcatatcatgaacctctatctgttcaatcccgaaaatgacttggccatagccttcggtggagaaaattacacccctccaccggcagcacaactcatcgggaaagaactctccacccttcccctttggtatgccgacgacgacaccacgatatacatacccgataaattaccgtccgattttcttcacacattagccccgctcaatttaaagatttctacggtaacacccgaccggctcgatggagcacaagtaaaacagatacatgtttgggggtggaaccgcgatttgataaaacgtttgagattagcgggaatcgataaaaccctattaccgtccgcacgacaatgcgataccattcgggaactatcccaccgaaaattttccgccgaaatcgggaaataccttcgtaaccgcatcgattacccttttcccgaacttccggtagaactacacacagccgacgagattcgatccttcacagaacaatccgatcgtaaaatcctgaaagccccgtggtcgggtagcgggcgcggactctattggaatctttacggatatgacacggcattggctcaatggagcaacggagtattgcagaaacaaggtatgcttatgggcgaaccggtctatgacaaaatcagcgactgggctatggagtttcacagcgacggattcgaagtaaaattcgctggatattcctcgttcctcaccgaccgtcacggagcatataaagaaaaccggttggcaagcgatgccgttttagaactcgaactgacccatgccgtcggcctcgaaatcatcactgccgtcaaagaatcgcttatcgactttttcaccgaacgcatagccccgtactacaccggatatttcggggtagacatgatggcctatcgcgacaaacgaggaaacacactcttgcacccgttcgtcgaactcaatctacgcatgaatatgggtatggtcgcacgcaaactcgccgaccgctttttgcctccggagacggaagggcgataccgtgtagactattatcccaaaccgggagaactccacaacgaccacgtcgcccgactaaaaacaaatccaccccgcataaccgacgggaagctcctgcacggatacctcgcactcactccggtctccccccacagccgatacagggcaagtatagaaatctaaatccccatatgtccctctacgtcaaaatgcactactgtaattaaaataagagaaggaaaaacacactttaaataaaacaacggttgaatataccgcccacataagccatctaaaaaaataaacgagctgcaaattcaaaaacatatacgattgaaatataatattttccaccccctccggctttcggactcctcccctatgttttgcaatgcaaaacataggggaggagtgcacaatgtatccttataccgaaactgaaacgccacttccaatcctctccccctgtgtttccgttagggaatatagggggagtgcccgcagggcgagggggttgaaacgacgaagaggttaaaaaaagcaacagcaacaatcgggtatcatactctcccccggccgtgtcccgtagcattacggggtgtcacataacgatataggtgcacctcacaatgaatagagggttatttaaactcctcccctgtgttttgtaacaacgaaatataggggaggtggcacgtagtgacggaggggttagaaaatagttaggagtatttattaccgttgtaaaataaaggggctatcaaacaatatgaaataatgaataggcaaaaaaaaattgattgtctcacgacaaccaatctttgttaaccttaatcttaatctaatactatgaaaaacacattgcaatgtgtatgaattttctgttatacaacataattttcaaacacaattctagcacatttaacattatttcaaatataaatatacttgtactttattggatcgtcatttttttcaaattatttttcaatccgattctccattgtaaaagcaaatcgatgcgctttatttttctcgttctttgtacaacaccaaaaggcagagttccgacataaacaaataaatttgcttcgaccctcggcttacattatctttgtagacatgaaagaaacatcggctcttatcgacaaagcgtgtcgcaacttgaatatcgactcactgaacggcatgcagaagcaaatgctcgaaacggctacacggccaaacgacattatactgctctcacccacaggctcgggaaaaacattagcattccttctgcccgtactgtctcgaatctcccccaaaattgccggagtgcaagcgctcgtcatcgttccctcccgcgagctcgctttacaaatcgacaacgtattgcgtaaaatcgccgcaggtataaaaatagtttgctgttacggcggccactccgtacgggaagaaagtaaatcgctcgccgtagctcccgctcttatcgtgggaactcccggaagaatcgccgaccatatacgccggggacgaatcgtactcgaaacgctcgatacccttgtcctcgatgaattcgacaaatgcctcgccttaggctttcaggacgaaatgcaagaaattatcgctcccttgaaaaacgtaaagaaaaagattctcacctcggcaaccgacagtgaatctctaccggccttcaccgctttgaaaaaaccgataaagctcaatttcctcggctcgcggaaagacagcgagactacgccgaccgacagactatcactctaccgaatcgactcgccgataaaagacaaattggaaacgctgcttgccctattacacaacctcaaaccgggactcacgctcatcttttgcaaccaacgtgaaagcgtagaccgtgtacggcagttcctcaccgaccggggcattatcgccgaagccttccacggcggcatggaacaagccgaccgagagagggcgctttgcaaattccgcaaccacagcagctacatctgcatctctaccgatctggccgcacggggactcgacattcccgaagtcaaatacatcgtacattaccacctgcccgtcgacttcgaaagtttcacgcaccgcaacggacgcaccgcccgcatgcatgccgaaggagaagcatttatcattctcggccccacagaacaaatgcccgaatacgcaaccgaggcgaccgacttccgaatcgacccgaaagccgacttcctgcaaactccgccaatggccacattccatttcgcagccgggaaaaaagaaaaaataagcaaaggagacatcgtgggattcctcactcagaaaggaaagctcgcagccgacgagatagggctcatcgagattaaagaccattacagctatgtcgctgtaactcgcgacatagcgcacgaaacgctcacccgccttaaaaacgaaaagataaaagggaaaaaagtaaagatttctttcgggtactgaaaagcacgttctattttccttccaccatcttttcgaacgcctgccacaaattatcggacgggacaggagccgtcacgctcacaagctccttcgaaaccgggtggacaaactcgatatgacgggcatgtaacgaaatccccccatcgggattggaacgctccgctccgtacttcaaatcccccttgatgggcgagcctatcttggcaagctgacagcggatctgatgatgccggcctgttttcaaatccacttccaacaaggtataacgatcgccccgagccaaaattttataatccaatacagcacgtttcgcacccggtttctcccggtcgtacgctaccgacttgttactcttctcgtttctgaccaaataatgtacgagttcgtcgctctccttttcaggagctcgtttcacgatagcccaataacttttctttacctcgccgttacgaaacatatcgttcaatctcgccagtgccttgctcgtcttggcaaacactaccaacccgctcaccggacggtcgagccgatgagttactcccacaaagacattacccggcttattatatttctctttcaaccacgccttcaacatctcgctcaacggagtatctcccgtcttatcgccttgcacgatctcagagcaattcttattgacaataatcagatgattgtcttcgtaaaggacttccataatttacacaaatttcaattttgtgcaaaaatagtacaaaccgagcgcagaaacaaatgtgcttggatatatcaagactccgcctattttttcgtaagccttgcaaaatagcgcaagcccaaaaaaagacaaaacgaacttttcgtttttcctatcgaatcgtagcttaccttcacttctcttgccccgaccgagccccctattaaaatatatagaaaaacttataaccaaagacaggacgataaaaaaaatttatttttgcacagtttttttgcaaccgaatatagagaaattacgtctctattagaaaacgacacatacaatgataaaaaaagcactcctccttgcaggtatattagtggtctttcccacgacaaaagcacatcccgcaaccgacaacgatacgacagaagtagtttatgccgacacaacgggaatcgacatcgactccatagaagcctcgatagatcacatagaactcgacgaagtaaccgtagaagcctccgcttgggtacgtaaagccgatcgcaatctgcttttccccaatgcccaacagataaaacaatcgaaaaacggattgcaattactgcaaaaactgcaaataccgggcatcgtcatcaaccccaccgacaatagtatatcgttgaccgataaaagcgaattaagtctccgtatcaacggacgtccggtcacggaaaaagaaatacaaggcatttctcccgagcaaatcatacgggtagaatacatcgataatccgggaatacgttatggcgaggcaggagccgtactcgacttcatcattaaaacacccacttcgggtggtagtttcatggggaattttacaccttcgctaaaccgagggtggggacaatattggacttcgatcaaagtcaacaccggcaaatcagaattctcctattccggttggttcgctccacgctggaatctggaaatgggtcgtagcaatacagaaagatacgaacttgccgatggttcccggtatgtccgcaccgagcaaagccaaaaaggaagcgggttcgaggcttggcacaacggacacacattgaactacaacttcctcgaccctcaaaaacaaatgttcaatgcctcgctcaatctcaataataacaattataaaaacaaatacaaaggcattttgaccgacgagcgtctcggaggaatcgaaaacaacatgtacgaccgcacggaatacatatctttacatccttcgctcaacctctactaccaaaataatttgaaaaaagaccaactcatcatggcaaatctcgtgaccagctatgaaacatcgcacagtcacagactttacaatgaaaacgatttagccacggatgcccctatggtaaacatcgataacctcatcaaagggaaaacattctcggtactcggcgaagtcgattacgagaaaacttggaaaaacagccggtttaccgccggaatacggcacacgcagtcatggatacaaaacaagtatgtcgaacaaaataccatcgatcgcatgaatcaaggcaacagctatattttcggcgaatactggttacgcctcgggaaccatttcgatgggtcggtcggactcggatacagcctctatcactatgcgccacaaaacaggcagtcccacacctactccatttggcgtccccggttcacggcccgatataccatcgacgactattcctccctacgattcaactttgtccgcatgggcagcgtaatcaccctcgacatgctcagcccggtcgttcaagacatagacgggattcaacaatcgaccggtaaccccgatgtaaaaccctatgctacctataaatacgaactgcaataccaatacaaccgaggaatattttacggaaaactcggcgcattctatacccatgctcccggtgcgatcatgcccgaaaaatactgggtcggggacaaaatactcagccgggtagacaatcaaaagaatgccgaagaattacgattctacctcaacacacgcatcaatgtcattcccggctggctcaccctcagtgctgccccgggttggcataaatactggatgcgaggaaatacctacacacatacctacaacaattttttcatcgatgccagtatcgatatttcccattggggatttacgctcaacggcatactccaaaccaatttcaatcgattttggggagaaaccctcacaggaggtgaaaatgtacacggaattaaactatcctatgcctacaaagactggaacttcgggatcatggttctcgatcccttcatcaacaattacaaagtaaaatccgaaaactggaaccgctatgcgggatattacagagaaacgacaaccaatatgattaaacaactcctaactctcgacataagttggaatatcaattggggacggaaacacgaagccggacaacaacgaatcaacaactcgatcaacagcggctcggtaaacgccgccgggaaataaatataggaacaatacaggggctatatcattcagatatagcccctgtactatatatatcttgtcgtgcagacccgattacatattcataccgccgcagcagtggataacctgtcccgttacatacgacgacaaatccgaggcaaggaaagtagctacattagccacatcttcgggcgtaccgcctcgacgcaaaggaatttgtttagcccattcggctttcacttcgtccgaaagagccgctgtcatatcggtaatgataaaacccggagcgatagcattggcacgcacgccgcgagagcccagctctttggcgatggacttcgccaaacctatcataccggctttcgaagccgagtaattacactgtccggcattacccgatacaccgacgaccgaagccatatttataatactcccgcatttctgtttcatcataataggagttacggcatggataaaattaaatgccgatttcaagttcacggtaagaaccatatcccattgctgctccgtcatgcgcatcatcaaaccgtcacgagtgatacctgcgttattcaccaaaacatcgatacggccgaaatcctttacaatttcttccaccaccttgtgagcctcttcgaaattagctgcgttcgaagcataccctttggctctcacgccaaaagcggcaatctctttttcggtagctttaccgttctcgtcgataacaagatccgtaaatgcgatatcagctccttccgaagcgaatttcagggcgatagcctttcctatgccccgtgctgcgccggtaatcacagcgacttttccttcaagtaatttcataactctttttttcataatacagggacaagacatgcgcctcgtccctttggttcatatttctatcgttttattccgtataaaataaaatccaatatataatccttcaatctcgatcggtctattcccgattccgaaaaattattgcggatataagggacgtccagcccccgaagcgcataatgaagcaccgaagcggtagccgtcacattaggaatatgaaatacaccttgctccacgccctcgctcaatatgctccgcaacaaggccacttctcgcaagtctatactcctccgggccttctccactttccaaatatccctgaaaaactccgctcgcaatgtcccgttacgcacgacagcttctttcacagcctccaaacggatattgatatagttgagcaacttctcttcgggaggcaaatcccggtttgtaagcccctccaaccgagcgtataaatgcttcgattcggcttccacgacggcccaataaatctcattcttattcttgaaataggtataaatcgtacggcgaccctttcccgatgcctcggctatatcgttcatcgtcgtagcggccacaccctgacgggcaaacaactgacgggcaacatcgataagcaattctcgtgtacgaaccataatcctaattcatctatctgcacatctgtacaaaacttgtgcgaaattacacatttttatcatgaaataccaaagtatgcaccccgtttttccttcataccacgatatttgcatttttaacaataaaataattttctgtcattcaacaacttaacaaaaattcaagaacaagccatatatatttctcttcaaaatatttgctatttaaaaaattatccatacctttgcactcacaaacatcgcggggtggagcagtggtagctcgttgggctcataacccaaaggtcgtcggttcgagtccggctcccgcaactacacaaggactgtaaattacagtccttttttattttccccctttcaaatctaacacctcgtcgagttcaaaaataagaatattatacccacccttgcttaaactgcaaaaaaaacgctttaacctctcccctgcccgtagcactacggggtactacaaaacggcaaagaaaaaagacctatacccgacttcatttctgaagctggtattaccctcctcccctgcgttttgtaacgcaaaatataggggagagctgaggagcgtagcgacgaggagagggattaaaaatacctgcaatggaagtaatagagttaaccctcctctccccctgtgtttccgtaagggaatatagggggagtgcccaaggggcgagggggttgaaatagaaaaaatatagcccactccccctactcatcgcaaatgaatagagggccacttctaaactcctccctgccgtgccccgtatgcggggtatcgcactgcaataagcggagggttactatcaccctcctcccctgcgttatgcaacgcaaaatataggggagagctgaggagtgtagcgacgaggagagggattaaaaatacctgcaatggaagtaatagagttaaccctctctccccctgtgttcctacaagggaatatagggggagtgcccaaagggcgagggggttagaatacaagcaagatcccccgattccgcctttatcgggcggtgaagtcgcaaggaaaacggaggaaaaatgggcgaggactgtccgaacgaagcgagttccgcagaccccgacggcgactgcggcgacaaacccaaaagcccgataaccgcggcggcgcttcttggttcgttcttctcgctgttgagaaaaataaacgaatagaaagtataatcatgccataattccactatcccactatcctaccttcgcaaaaaaaatcaaacgagcgatgatagatacaagattcgaaacaaccatagacctgagaggtgaaatcgagaactaccgacaagtagcgctcatcaaatactacaagatcctcctcgaactcgacccccgccgggacaggctgaccatgctcgccgtcattcgttgtatcgacaagctcgaaagacattcccaagaacgaaaacgatcccgaaacgacaagaagaaaatgctggccgaaggaactctcgcttggcactatcagaaacgcaaccaactcttccgaaaagccggactatacgacatcgagtccacccagttcctcgtcgaccacgaagaaatcttcgacacacacgaggaacgggaagagcgcgaacgattcgaagcctgccgtcgggaagctctcagaaggaaaaccgaaacgcacgaggccgaagaaaaagaatccgtgcaaccggcctccgctcacgaagccgataaggacccgcaagaagactacacgacagccgggtccgaaatcccggcacacacaccgcagccctcatcgcccctatccgggagcatctggtgcggcactcctgccggtaatcccattggagaacctgcacccggattccatcaatcctccttcgattgcaacagaagagaataaatccgacaggtggagggtgaacctaatcccctctttttccctctcgatttcgatgagcagaaactggaagtctcccttctcccctaccatacctcgtaacataacgagccattttctcatctcctctgtgttttgctaatgcaaaatatggagcgaaacgtcatgtcgtatcaacaaaaagattcaagaccgtcaaaagcatgagcaaattagtgtaacaaggactttctttgacagggtaagaaagtcctttgtatcacaatcctcccctgccgtgccccgaagcattgcggtgtgtggcgcaaaaaaatataggggaggtggcacgaagtgacggaggggttaataaaaacagcagcccgaacggttcgttcttctcgccactaaaaagaataagcgaatcccccctcacgaaaagattgaaatatggcaaaaaatttcattccatataaaaaatagattatttttgttttaatatttttataataacatatcgataattatgaagatccagaaaaaccgagccatttatatagggttgttgatcatcgtatgggcatgtgcctacgtttacatttttaatgaaaaaatagatataaacggggacaactgccggtactatacatttgcctcgtctctcgcttctggacaaggttatgccgatatatcggctcccacccctcaccccaccaatgcctttcccccgggatatcctttattgatgaccccgctaagattttttaccgacagcatcatagctcaaaaaatactcaacgggcttttccttttaggcggagctttgttactgttcttttttatgatcaaacgcaaaatacccgaaagccttgcactagtaggagcctgcgccgccattctgagcgatcgggtacttcacttctccacgatgatgatgagcgagatgtcttgctttttcgtttcaaccgcggccattttcctcttagcgaatatgaagaaagaaaagccattctataaagacctttctttctacggcatgttagtcatggtcatactctgctaccacattcgtacacaaggagttgctctattcgccgccgtcgtgctcttttttctctgtacgaaaaagtggaaagaagcggcaagcacagtcgccggattcatcatcggttgtctcccgtggatatggagaaataaatcgttaggtatcgggcaaagccgttatttcgagtccattgcacaagtaaatccgtggagacccgaagacggatcgctcgatctgagcggtattatcgaccgctttttcgaaacgctcggtatgctggtttccaaagccctgcccaactcggtaatcccctattttaaagtcaattactccgccgaagtttccgccggatttttcatgtggatcatagcgatactgctcatttttctcatcatacgcggtttttgggctttcgggaagtaccgttgggtactcatcggttacaccgttttcactttcggactcgtttccattttcagtacccccagtgaaaaccgctacattaccacacttattcccttcatgaatatgggattactcgtaggcatctacgccgtggcgacggatacgatccatcgtttcaaattaaaatatactttctccccgtgggtactctcccttttattgctcaccggcataggaaacatacaggagttacacgccatgaacaaaatgccgttcccgccggcctatcaaaacttttttcgattgggtctcgtgttaaaagaacatgtttcgcccgaaaccgtagtagcctcccgaaaaggagaattactctacatgttttcagggacacgagtcgccggctacgcctattcacaagacgaccgcgctgtaatacagaaaatgctcgacgacggggtggaatatgtcattctcgaccagctcggatacagctctaccccccgatacctttacccggcgatacaaaagaacgacgaccttttcttcgtcgcttcccatgtacccaacccggatacctatctattaaaattcgacagagaggccgccaagaaaaaactttctcaatcccaacggcaagatggaaaaaatacgctaccttagagccgggaagcgatcctttcaatttcaatcgacagatatgaatacaatcgataaaaataaaaagcaagccgtcatcgccggagccggtcccgcagggctcaccggagcctacgagctactcaaacatacagacattcaccctgtcgtattcgaagagtccggtgacataggcggtatttccaaaacagttcgatatcaaggtaaccgcatggatataggaggacatcgtttcttctccaagagccaacgagttaccgaatggtgggacgaaatcatgccgttacaaggcgccccctctctcgatgacaggttgctgggaaccaccggcaaagaatttgccccaaaaggccccgatcctgaaaagaccgaccgcgtgatgctcgtaagaaaccgcatatcccgcatattctacctgcataagtttttcgactatcccatatcgctcaaactgaaaacgttcaccaacatgggacttttccgcaccatcgaagccggttgcggatacgtatggtcggtattcttcaaaaagcccgaaacatcgttggaaaacttttacatcaaccggttcggcaaaccgctttacagaatgttcttcgaagactacaccgaaaaagtctggggcgtacacccctcgaaactgggagccgactggggtgcacagcgagtaaaaggactgtcggtattcgccatactcaaagacatgctcaaaaaaagtttctccaaaaaggaaaacctcaaagaggtggaaacctcgctcatcgagcaattcgtctatcccaaactcggtcccgggcaactttgggaaactgtggccggcgaagtatctgaaaaaggaggcgaggtcatcacggaaaccccggtcaaagagattcacatcgaaagaaatcgggtaacaagtgtcacagtcgagacaccttcgggcgaacggagagaagtaccctgcgactatttcctttcgtccctcccgctaaaagacctcatacggtctatccggggaatcgatgtacccgacgatgtgaaacgcattgccgaagaactgccttaccgcgattttatcacggtgggactattgatgaaaaaactatccataaaaaatcgaaccaaaataaaaactttcgccgatcgcatccccgacacatggatttacatacaggaacgcgatgtgcgaataggccgtctgcaaatattcaacaactggtcgccctatttggtaaaagactacgaaaatacgatatggatagggttagaatacttctgtaccgagggcgacgacttttgggaaatgcccgataaggacttcacgcaaatggctatcggtgagctggcccaaatagggatcatcgatcccgacgatgtcttggattcggtacgcataaaagtcaaaaaagcctacccctcttatttcggcagctattacgaactcgataaggtaaaagatttcttgaacaaaatagaaaatctttggtgcataggccgcaacgggcaacatcggtacaacaacatggatcattccatgatgaccgctatggtcgccgtcgatcacatcgccaccggaaataacgataaaagcgaggtatggtcggtaaatacagaagaagaatatcacgaaagcaaatgaatccgactgataaattcaaaaaaatcttctacggagcatccgataatctccttatccaattcgtgcgatacttctttgtcggaggattcgcttttatcgtagacttcgggctattgtatatcctcaccgaatacgccggactgcattatctcctctcggcgaccctctcgttcatagccgggttggtcgtcaactacatcatcagttgcatttgggtattcaacaattcgaaatttagaaaccgcattgtcgagttccttttctttgccgcaataggagtcgtgggattagggttcaacgaccttctcatctggctcttcaccgactgtatcggcacacactacatgttctccaaaatcgtcgctgccgctatggtctacttgtggaacttcttcgctcgcaaatacttggtatttaaataaacggaagaacagacaagccacaggagtctcttaccagtctgtccagaacataaaaaaggctgccccaaccgcttggaacagccccgtataaactacttgaacagttttctacttgttaatcaagaaccaagcatcggtaaactgagggtacttagcctgcaatccttcgcgagcctgtacggcagtagccctgtcgtcgaacgaacaagctacgacacgatacataccttgtgcattctgagccaatacggcaggatagccgtcggcacgcaaacgctcgcaaaggctctgtgcattgagtcgctgacggaagctccccacgattacattgtaactcttcaacaaagcatcgttcccgtcgacagcgtttattttctcactctgttcccgaataggagccgtcgtcgttgtcgtcgaaggagttgtcactacgggttgctccgctacgggtgtagttccggttgtaacaggctcttctatcttcttctcttgggccttctcataagcagccttataggcactttggctcgacttacacgatgccataccaccgattaacaaaagggataatccccaaatccaattctttctcatagggctataatttttaaatatttactcgatttcctatttctattcgcctttacgaatacaatgcaaaagtaacaaataaactttattacaaaaatcaatcttacaaaaatacaaggatcacctatcattttgtttacccctgcccccatttcaaaatctcaggatttgctccccgattcacaaaacaccttttgtcgaaggcaattcacggtcggtaatatcccgtttcactgccattcgtaaagctcgcgccaatgctttgaaaatcccttctattttatgatgttcattcgtaccttccgcttgaatattcaaattcatacgagccgcatcactgaacgacttaaaaaaatggtagaacatctcggtaggcatatcgccgatcttctcacggtggaaagttgcattccacaccaaccacggccttcccccgaaatcgagagcgaccctgcataagcaatcgtccataggcaaagaaaaaccataccgacctataccccgtttgtcacccaacgcccgagcaaaggcctcgcccaaagctatcgccgtatcctctatcgtatgatgttcgtccacctgcaaatctccggtcacgaacacagacaaatcaactccggcatgccgccctaactggtccagcatgtgatcgaagaatcccaacccggtatgcacctcggttcgccccgtcccatctagattcagcgtaacgcaaatatcggtctcggaggtacgccggtcgatagtaacccgacgagttccggcacataaaatctcggcgattttccaccagtcgtcggtcaccgcttcgcagaccgatgaaagtccctcagcttccagctcagccacaccccgctcgggcagagcgaaataaatcgctttacaaccgagattagcggccagttgtacatcggtcattcgatcgcctataacataagaatgttccaaatcatactctcccgattggtatcgagaaagcatagccgtacccggtttacgggtcggaaggttctcttcgggaaacgaggagtctacgcaaacctcgtcgaaacgaataccctcgttagcgaaagcctgtataattttacgctgcaccgtccaaaaattctctgccgggaacgaaggcgtgcccataccatcttgattggtcaccatcacccactcgaagtcgagacgggtagccacataagcaagactctgaaacactttgggcataaattccaatttttcaagcgaatcgacttgtttatccacaggaggttctactaccaatgttccgtcccggtcgataaaaagaactcttttcataactctcgaatttagctgtaacttttcaacgtttccaataaaaccttcatttcccgatctgtcccgatagtgatgcgcagacaatcgccgcataaagcaactttcgaacgattacgaacgacgattccatcggtaaccagtcgtaaatatatcttctcggcatcctccatcttcaccaatacaaaattggcatcactcggataaaccgtttttaccatcggtatgccggacaggcgctcgacaaaccgcgaccgaaccgataatatctcatcaacccaccgccggacttcgttctcacggtcgagcatttccatcgcataacgctgaaccaaagcactgatgttatacggatatttcacttgattataatagccgatgatatcaggcgaagcaaacgccattcccagacggactccggcactaccccatgccttcgaaaaggtttgcagcacaaccaaattatgaaattcgttcaaccggcgaatccacgaaggccgggacgagaaatctatataggcttcgtccacgaccacaatcccgtcaaaagcagttatcaatcgctcgatctcgatagcaggaaagacattgccggtaggattattcggcgaacataaaaacaacaacctgctatgagtatcgatagtttgcaatatagcatcgcaatccaacgaaaagtctttcttcaacaggacttcgcgatactctacgccgttaatgtcggcacacactttatacataccgtaggtaggagttatcgaaaccgcattatcccgtccgggctcacaaaagatacgatacagtaaatctatcgcttcgtcacttcccacaccgagaaaaatgttttcgggcattacaccccgttgcttcgccaacttctctttcaaatcgttttgcaacggatcgggataacgattatacggaggattaaacgggatttcattggcatcaagccataccgaagcctctcccgaaaattcattccgagccgaggaataaggttttaattgtcgaatattgggacgcacccattgttctatctttttcataactgcactttttaggaatgaatagactgcaaacgcaccgtcacagcttctttatgcgcctccaatcgttcggcctccgccatttcctcaatcaccggaccgagatttttcaacccttcggacgaaatctgctggaaagtaattttacgagtgaagctatcgagatttaccccgctatacgacttggcatacccactggtcggaagcgtgtgattcgtccccgaagcataatcgccggcactttcgggggtataatatcctaagaataccgacccggcattaacgattgccgaagcccactcctcggcatctgcacgatgcacgacgaggtgttcgggagcatacgcattgacaaagtcggccaaatcggcctctcgctccaacaagacgaccgagctgtgagaaagagacttctccacccattcacgccgaggcaatcggtccagttgtcgttcgatctcagccgggaacaaatcggctattctacgatcggtagtcagcagtatcgactgactatcagccccatgttcggcctgcgacaaaaaatcggcggcaagaaatcgtacatcggcgcccgaatcggccacaatcatcacttccgaaggccctgccggcatatcgatagctacaccttgcacggatacttgctgtttagcggccattacataacgatttcccggtccaaaaatcttatatacctgcggaacactctccgtgccaaaagccatagcgcctatggcctgcactcctcccagtttaaaaatacggtctatccctgtctcacgagccgcatacaatatagcgggggctatcttaccctcctttccgggaggagtacacatcactatttcgtgacaacccgccaaacgagccgggacagccagcatcagtaccgtagaaaaaagcggagctgtaccgcccggtacatacagacctactttttctattcccacgggcttctgccaacaccatacaccgggcgaggtttctacttttttcacctcgatagcctgcgaagcgtggaacttacgaatgttgtcgatagcctgtcttatcgcctttttcaaagactcgggcacagccgcgaccccttcttccatttcggcaggcgtcacctgcaatgcatccaatacaacccgatcgaattgcttctcataacgtctcaacgcatcgtctccttcgcatcgtaccgactctaaaatatcggataccgtgcgagataatgagatcaaatccatttgcggacgagccataatcgacttccattcgtcccacttcggatatttccaaaccgtcactgtcatatcacaaaatcatcttttcaatgtccaacaccaatataccctcggctcctgccgttttcagccgattaataatctcccaaaagcatttttcgtcgagtaccgtatgcaccgaacaccactccttatcagccagaggcatgaccgtggggcttttgattcccggcaacactgacaacacgtcgttcaacttcttttgcgggacattcatgagaatatactttttatcatctgcggcttgtaccgaatcgaaacggaacaacagctcgtccagtattccccgcttttcggaagaaatagaatccgttcctatgagaacagcttccgattcgacgacggtttcaacttctttcaatcgattgctaaccaacgtactgcccgaactaacaatatcgaatatggcatcggccaatctaattccgggagctatctcgaccgaaccggtaattacatgaatgtccgaaactatcccgttcttgtgcagataatctgacaatattccgggataagacgtcgctattttctttcccgaaaaccagtttctatcttgatagtctatgttttggggtatggctaatgaaaggcgacacttcccgaagcctaactttttcaaaatacccacagggcaacgcttctccatgacctcgttcaatcccacgattcctacatcggcaacccccgaagccacagactcaggaatatcgtcgtcccttagaaacaacacttccacggggaagtttcgtgcaggaaccaacaacgtcctcttccctcccggtatcctgatacctgcctcctctaacaaagccatagactcctcatatagtctccctttcgactgaatagctatcctcagcataactcttcatgtttttaataagtaaaatccatataaaaaaggcttaccataatccggtaagcctacaacattttcctatgttatttttacatacagactcaccctatcccccaaagggacaatgcacgtgactgtgatgtaaaaatagaaccatcattaatcttaactataaattttcaacaaatataaggcgttaaatacaaaatacaaattatttcgctatttttctttcaaatttatatattatatcgttttttagtaacaacaaacttatcctaaaaagaaagtaacgaccatataaatacctgctgccaaaagcgcactgacaggaatcgtaagaatccatgcgactaaaagacttttcgtcacaccccaacgaaccgcagataagcgtttggttgctcccacaccgataatagccccggtaatggtatgtgtagtacttacgggaatctttaaaatttcggttaaataaagcgtgaacgccccagccgtttcggctaccactccctccaacggagtaaccttcgtaattttcgttcccattgtttttactatcttccaacctcccgacatcgtccccaacgatatggccgtaaagcaggcaaatgctacccaatcgggcaaatcggcaatgctgtttatacccatacctaaacccatcgagtgagcggcaatcatagcggcagcaataatacccattactttctgggaatcgttcaaaccatgcccgatactaaacatcgccgaagaaaccaactgtaatttcttgaaccaaacctcagccttatggggttgaacccggcgacaaatatgaagaaccaatatcgtaaatccgaacgccacgaccattcctataaatggagccaagaaaataaatgcggctattttgagaataatattgagctgaatcgccccgaatccactcgccataatggcagcaccggcaaatcctccgataagggtatgcgacgaagaagacggaatacctttccaccaagtaatcaaattccatgcgatagcggcaatcacacccgacaaaataataggcagagtgataaactcttctaccacggtcttggatacagtattggctataccaaacccaccgataatgtatttggcaataaagaacgcgacaaaattaaagaaagcagcccacaaaaccgcttgaaagggtgtgaggacttttgtcgacacgattgtcgctatcgaattggcagcatcatgaaacccgttgataaaatcgaacagcaatgccagtacaataataactatcaataactccataacatgactctttacggatttatgcgtacttaacaatcaacgttctcaggatttttccaacatactcggccgagtcggtagtcttctctaatatctgcatgatctcttttatcttgataatctcgatacagtctttctcctcctcgaataactttgtgatgaacagttcatacacatcgtctgcctgattctctatatcgtgtaatttcgaacaatattctctcaatgtagccggattcttgcgaaacgtatccaactcgtccatcgctttacagatataatcagcctctttttgtaccagcaaactcagttcctttccgctatcgccgataggtcgcggattataaatcgctatgcgtttcgcacaactgtttattccatcgatcacatcgtccatgtgagaagccaatgcctgtatatcctctctgtcaaacggagtaataaaagtagttcctaattcatcaaaaatcaagtgagccaatctatccccttcacgttctaagtctttaatttttttataataggaagatcgttcctccggcttgtcatgttgcatgctctctaccaaaacagccgaagaagaaaccaacacttcggaaagttgtttcaacaatgggaaaaatttgggttccttaggggtaaatctgctaaaaaaggaatttttcataaatgtgtataatataattatttaatgtatcctctttctcgatttatccttatctactcaatgccaagaagataaaacggatatatcttttgtagattgcaaaggtagaagaatgtatatatacatcatattacatttattttaaattttcacatggcttaattttttatttcatatcatacataaaaagattattttatttttgttcccgaatattcctcaccgagatgcaaaataatatgattatagaacaaaccgaagatggtatccccactctctatttgccgagaatggacgaacattaccactccaccaaaggagctttggcggaagctcggcatgtatacatcgactctgcattgcgagcttctgggaaaaaagaaatcaatgtccttgaaataggtttcggaaccggattaaacacatttcttacatttctcgaatcacaggaaaaaggattaaggataaattataccaccttcgaactatatcctctctcccccgacataaccgaaaaattgaactacccagcgctcatagccccaagctcagaatcgatatttgctcttttacatcaatgcgaatggaatcaaaagatcgctatatcacccttgtttaccttatacaaaagccatgccgacctcacccgaacctctctcgaaggaatatacgacgtggtttatttcgatgcgttcgctcccgaaaagcaacccgaaatgtgggacgaaaaaattttccgggagattttcagtcacttgtctccgggtggtattctgagcacctactgtgcgaaaggggaaataagaagaaggcttcaatctgtcgggtttacggtagaacggttacccggcccgccgaacggtaaacgggaaattctaagagcatccaaaagataactctgtcaatagattgcatcggctaccgaggcactcaatttcctaccgactcgctgtaacaagatataatagtattcatcggtttcatcgaacgaagccacagacaagcctatctccgtaaactgggcgacttgttccgctaccggtaataaatctcgggcaaaaactttatccgatatacgtttgtgcatttcatttaattgttcccgactttgggaatgggcaatcaacaatctaccaccacaatacagattatcggttaccaagcgggcaatcgtatctaccggataacgaaaatgagggaacaccgaatacagcaaaatagcattgaaacgtccacccaaacgatcccgctccacatcggcccggacaaagcgaactcctgcattgggaaaacgcaaagaagcctccctcagcatcttttcagaactgtccacagccacaataggagcataatgccctacctgttcccggataaaaggtatcataactcccgttcccgtacctatgtcgagaaccgtatcgccttgtttcaactgtaaaacagacagcactttttctatcctcccggtatcataccgacaagttttattccacaccccggccatttcgtcaaaaaaattcatttctcctcctttctctcaaaacaagccaacaaatactcgcaccactcgtccatgcccataccccgggtcgccgaaatttcaaaaaaacacaactgaggatttattttcaaggcattatctttcaatcgggcgacatcgctatccacataaggcaacaaatctattttgttgattatacaaatatcagcaccggcaaacatatagggatacttcaacggcttatcgtctccctcggtcacactgagaagaacgactcggagattttcgcccaagtcgaacatggccggacacaccaaattgcctacattctctataaacaacagcgtatctttcacggccaattcatcgaacgccgacgataccatacgggcatcgaggtgacaaccattgtgtgtattgatttgtatggctggaatacccaaattcctaatacgtccggcatcattgtcggtatgctggtctccctctattacggcaatcttatgaaaatctcttttacccaactgtttaatagtgctttcgagtaaagtcgttttacccgatcccggcgaactaaccaaatttatcgcccaacaacctgttgtattccatatatttctattctgcccggcaatcctattgttctcacttaaaatatcttgttctacggcaatatcaaccgttttcccatgtccgtgagcaattcccagacaatgcatttcttcatggctcatctcctgatggccacaaccgcaagtcgtacacatatctttttaattttaatattattacttatctgtttctacaatcagtgaggtaagacgaaactcttgtcccgaaaccaaccgtgttttatagcttccgcatttcgggcacgaggcatataacgaaaccggtgaaaacgactcaccgcaaacaccgcaaaccgccaacggtttcacccgatcgaccattacccgagcaccggcaaacgcacttctctccaaaaccatattcaatgaaaataaaaaagcatcattatccacacccgataaatcgccaatagttatctcgatgcatcgaaccgaaccaccaccatgtagtgccagctctttttccaccagctccaccacgctacaagccaacgacaactcgtgcatgcctcttatcattatggttcatcgattgttctatccatgcagctgttacggccatttgtcccacggcaataccggcatcgttacaagggacggaagcaggcaaatagggttgtaaccccaactgtctcaacatgggcatcaaaatatcgaccaacaacttattttggaaaacacccccgcacaggacgactctcgacaacttttgccggacagcctgtttcgccaattcgacgcaccacatagccgcataggttcgatgaaaagccgaagctatctcagagcggggaactccattctgtaaatcgttcaaaacagccttcaccaaccacgaaaaatcaagaggattatctttgtcgaaagaatagattttcaagatagaacggtcggcgacttgttccaacttttgaggagcttccgatcgatatctattgaaatccgctatacccaatagagaagcgactgcatcgaacagccggcctgccccagaacttaacggagtattgatacgacgggcaatcatacgactcaccaatttaatacggtcctctcctacccgttttacgaaattgtcgggtaaaggcatattctctccatacaacgagtacaacagcgatacggccattctccacggttcacgagcagcaatatcgcctcccggcatcggcaaataaagatggtgcgataaccgtctatattccgtacgagagcaccggatcagttctccgccccaaatcgtgcaatcatcgccataaccggttccgtcgaggcataacgccaatacatcgccggtgagcgcatattcggccattacagctacggcatgggcatgatgatgctgtacccgatacacaggtatatgcctctcggctgcacatcgttcaccccatgccgtagcgaaatagtcgggatgcaggtcacagaccacacacctcggttcgaatcgaaacattcgagaaaaatgagaaatcgattcttcaaaaaaagaaaggttttcccggcaagacaactcgcctatatgttgacccaataaaatatcttcttttttccctatcgcaaagcaagaaacctgttcggccccgacagccaatattccttcggtagcctgcacgttgcgtaatggttcgggagtatatccccgtgaccttcgtatgggacgacaaactccgtcatattcctgtacgacagaatcatcgacccggttgtaaatatcccgattgtacgaaacgaccgaatcgactttggaatcaaacaaatcatgagcctcttcatctgctatgacgataggacgtccccccatattcccactggttaccacgattcgtctcaattcgggagcttctgtaaacaaatcataatgtatcgccatataaggcaatagaactcccaaagaccgatatccctcattcagccacggcgcattatgcactttctcctccgccagcacgataggccgcctccacgagttcaacgcttttcgctcctcatcggaaagattcaaatcgaccattacctcccgttcgtcccgatacatgacagccaaaggcttggcataacgacctttcaactcccgtattcgggcgacagcctgctcattatcggcatcgcagatgaggttgtaaccgcccaaacttttcaaagcgacgacacctccattcgacaatacatcggatattcgcgaaactatacggatataaaccgtatcctcattcccttcggaatcccgcagcgtataatgcgggccacattcgttacaagcgatgggttgtgcatggaaacggcgatcatttacatcggcatactcctcccgacacgtatcgcacataccaaaagagctcatagtcgtaacggctctatcgtaaggtaatttttcgataatggaaaaacgaggcccgcaatgcgtacaattgataaagggataccccatgcgatgcaactggtgtttccggtctttcaaacaatcggagcaaatagctatatcggggcttatacgtgtgatttcgtcaccagaactacggctgggagcgatatcgaaactttcatattttttcgagacacggcgttgtactgtttctatatgttcgatagaagcgacctccggagccgattttatcaaagccttcaagaatttctccttttgaatacaggtagattgcaacacgataaaaactccgtcgttgctattatccacgtacccacgcaatcccatctcagtagccaagcggtatacataaggacggaatcctactccttgcacaagacctctgacatgtatgtgatattgattcatctgcaaaagttttttcagatttctttctaaacaatacaattgtaaaagttgttcattatccgtaccaaaactattactcaaattatgtgcttggctattcccggagaaattctcgatatagatacttcctgttccctgcgtatggcgacagtcgatttcggcggtatacataaatccatttgcatacaatatgtcgacgcggagcccggcgatttcatcttggctcacgccggcatggcgataacccgtctcgatagtgaagaagcagaagctacattagaggatttcaggatcctcgcagataatcttaatcccgacaaccatgtggtatgaaaaacaattcagggataacggtaatcttacgacattacttcaagcaatccgacaaatagctacgttcccgatacgaatcatggaagtatgcgggggacaaacctatgccctgtcccggtatcgaatcgaagaattactccccaacacggtacaaatgattcacgggccgggatgcccggtatgcgtcacccatgaagataccatatcgcaagctatcgaaatagctcggaatccccaaaccatattctgtaccttcggagacatggtacgtgtgcccgggacaaaaggaagtttacaacaactcaaagccgaaggaaaagatatacgtattgtctattctcctctcgatacgttacggatagccagtgaaaatcccgaaaaacaagtcgtcttcttcgccataggattcgagacgaccacacccctatacactttgttgttgcaagaaatcgtctcccgaaaaataaccaatctatccttgctgacctccttgttcaccatacccgccgccatatcgtttttagcccaagatcccgaatgtaaaatagacggactgttggcagccggacacgtatgctcgattaccgggctccgagagtacgatgccttggccgaaaaattgaaattgcccatcgccgtaaccggattcgaaccggccgacttattatatggcatttatcaagttatacggttgaaagcacaaggcatcgaccgtaccataaacgcttaccgaagagccgtacctacacaagggaacagaatggcccgacaaaagacagaacgtttcttcacaccctatgacgcctattggaggggattgggaaagatacccgtcagcggattgagactacgccccgaatatgaacaatacgaagctcgaaatcgttttttatgcaaagtgaaaccgggcattcaagcctccgtatgtcgggcaggagaaatcatgaaggggaaaatatctcccgaaaagtgtcccttgttcggcaaccgttgtacccccgataccccgttaggggcatctatggtatcgtcggaaggagcttgctctgctttttatcgttacagaactaactaaaaaacgaaatatgaatttacccgactgtcccacactgacacaaaaatacgaccgaatcgtcatggcccacggcggaggaggacgaatgacaagccgtcttatcgaaaagattttctatccggcctttcaaaacaaatggctcgaacaagctcatgacggagcgacattgaatttgccttccgcccggatagctatcacaaccgactcgttcgtcgtagacccattgttctttcccgggggaaacatcggggacttggctataaacgggaccgtaaacgatttactgtgttgcggagccactcctctctatttatcggcaggatttatattagaagaaggcttacccatagagacattgaaacagatcgtacaaaccatgcgaaaagcggccgggaaagccggtgtctctatcgtcaccggagacaccaaagtcgtcgaacacggcaaatgcgacaagattttcatcaacacgaccggagtcgggatcgtccccgaaaatatcgatataggacttcaccgcatcaagaaaggagatgccgtaatcgtcaccggcgatatcgggaatcacggaatctgtattctctccacacgagacagtttaggtttcgagacctctatccaaagcgatacggcggcactcacccaaatcgtctctaatctactggccggagttcccgatgtacatatactacgggatcccacacgcgggggattatcgagcacgctaaacgaaatagccgagggtgcgaacgtaaccatcgccatagacgagaacgaattacccatcagctcgtcggtcaacgccgcatgcgacctgttaggcttagaccctctgtatgtcgccaacgaaggaatcatgcttgtctttttaccggacgagtatgccgaacgggctctacaaatcattcgaagtgacatacatgggaaaaacgcacggataataggacatgtaaccgaagacagacacccggaagtaattctaaaactatccttaggacaaacacggattctcgatatgctgagcggagaacaattaccgcgcatttgctgaaaccataaatcggaaaaaaacaatggaaaaagaacaaactttctatcaggagctgaaagccaaaggatacacccgtcggcaattccttaaattctgcggtatcatgggagctatgttgggccttcaccaaaccggtatagcccaagttgtcaacgcacttcaaaccaagccccgcaagccggttctttggtttcactttcaagagtgtacttgttgcagcgaatcattcctacggtcgtctcacccgcttgtcggacaaattttgcttgaaatgatttctctcgactattccgacacgctcatggcagccagcggtttccaagcagaagaagtccgaacccgttctatgaaagagaattggggcaaatacatcatgattgtggagggttcgattccactgggaaatccgggatactgcaccattgccggacattccgctaaacaggtattcgacgaggctgcccacggagcgagtgccattatcgcatggggaaattgcgcgtcctccggttgcatacaaggagcttacccgaacccgacagatacgaaacccgtacataaaattatctctggtaaaccggtcattaacgttcagggctgccctcctatcgccgacgtcatggccggagttatcacttacatattgactttcgaccggttacccgaattggataatatgggcagacccgtctctttctacggacggcgtatccacgatacttgttatcgccgtcccgcctacgatgccggactgtttgtcgaagccttcgacgatgaaaatgcgaaaaaaggatactgcctatataaaatgggttgcaaaggaccgaatacattcaattcgtgcgcagtcatcaaatggaacgaaggggtcagttaccccatacaatcgggacacggatgcattggatgcgccgaacccggattctgggacgcagaacccatgtaccatcacctccccggcatcaaaggattcggcatcgaagcgacggccgaccaaataggactgggactgacagccgtagccgctgcgggagtaaccgcacacgccatcgtgacaaacatacaaaaaagaaaactcattaaaaatcagatggacaacgacgatatcaataaagaagaattcgccgtagaagaacatcaaatcgaacgggaagaaaaaagactcgaccaaaaagctcataaactggaaaaagataaagataaccgataaaaattcgaattatgactaaacgaattgttgtagaccctattacgagaatcgagggccacctccgcatggaagccgatatagaaaacggtgtcatcaccgatgctttcagtaccgggacgatgatacggggaatcgagatcattgtcaaagaccgcgatcctcgcgacgtttgggcatacgtaggccgagtatgcggagtctgtacctccatacattcgctctgttctgtcagggcagtcgaagatgcgctacacatcgtcattccgccgaatgccgagcaggtgagaaacctcatgcaatcggccgtaaccatacaagatcacgttacacacttctatcaattacaggctctcgactgggtcgatgtcatgtcggccttgaatgccgaccccagaaaggcagccgaagtggcgcaaagcctatcggaatggcctaaaaactccatcggttattttgtcgaaatacaaaagaaaatacgcacgttcatagagaccagcaaattcagtattttttccaacggatattggggacacccggcctataaacttccgccggaagtgaatctcgtggctttggctcattatctcgaagcgctcgaagtccaaaaagaaatcgtcaaagtccaaaccattttcggagggaaaaatccccaccccaatttcttggtcgggggtatggcctgcgccgtcaacataaacgatcccaacgccctcaacatggaacggttgaattatgtcgctcaaatcattgaacgtacgcagaccttcgtccgccaagtctaccttccagatgttctggccatactttcctattaccccgaatggacgaaaataggcggagggctgcataattatatcgcctatggagattaccctatgggtaactacggggaactgtcgacctataaaagtccgaggggtattgtcgtcggtcgcgacttatcaaaagtcgtcgaattcgatccctgggctatggacgggctgttggaatttgtcaacaattcgtggtattcctatacgcaaggcaaagatgtggggcttcacccgtcggtcggcgaaactcatctgaactacacgggtgctacgccaccctatgaatacctcgatagagaccagccttacagttggatcaaaactccccgatacaaaggtatgcctatggaaacagggccattggcccgtaatatcgtaggacatgcatcgggcaacgaagcctataaagaaatcacacaacggtgtttgaagcaactgaatgtcccctacgaagcgatgtactccacagccgggcgtactttggcacgagctatcgaagcaaatttattggcagactggcaaaccgagttttacacggctttactgcaaaacataaagaacggagactaccgtatgttcaacggtataaaatgggaacccgacacttggccggaagcagcgcaaggtgtaggactcaccgaagccccgaggggtgcactggcccactatgtaggcattaaagataaaaaagtcttcaattaccaaatggtcgttcctactacatggaacgcctctcctcgcgacaccaaaggacaacattcggctttcgaggcctcccttatcgggactccggtcatcgatccccgactgccgctcgaaatcatacgcaccatacactcgttcgacccctgtatggcatgtgccgtacatctatatgacgaaaacggtgaacacatacaccgatgtgaaatgttataatataaaccccaagcagttgaatatatgataagccggaaaaaatctttacgtgaagtctacgtgtgggaactccccgtacgcatattccattgggtcaacgcaacagctatcgtcgcactatgcgttaccggatacattatcggcaacccacccgctatacaacatgccactccacccgaagctaactattggttcggttgggtacggtttatccatttcgctgccgcatttgttttcattctcaactttattgttcgcctatattgggctttcgccggtaactcgttcgcccgatggaacaattacctccccctcacccgaaaacagtggaggagtattttcgataccaccaaagtcgatgtattgttgttgtcgccgaaaccggtctatgacataggacacaatagcttggccgcctttacatacttcggggtcttcgtcctattcattatccaaaccgtcacaggactagccatgttctgcgtgtccaccaacaatgttatggaaccctttttcacttgggtattactcaaatgcggagggttcttcgtcgtaaggcaaatacatcatatcgccatgtgggcattcattctctttacgattgcccacatatatctggtattttaccacgactatatcgaacgaaacggaatagcctcctcgatcataggaggctggaaattcgttcgggaggatttggcggaagagtacgagaccgaacaaaaacagcaacaacaacttcaaaaacaaaaagatggaatcgcaaacgaaacaaccgaaaaataatcctacacccgataagatactcgttttgggaataggaaacctcgtactcaacgacgagggtataggaatacacgtagtcaatgctctaagcgagatggagataccacaaggtgtggacgtgctagacggtggaaccggtggccttgccctgttggaaacattgcaaagttaccggcaacttattctcgtagacgcagcactcgacaacaacccagtcgggacgattcggcgattatcgccccaatattccaaagactatccgcccctgctaagtgcacacgaaataggattgaaagaaatgatagacgccatgctattactcggacaagcaccccgtatcgaactacttgccatcagtgtgcgcaactgtcatcacttaggcatgcaactatcgcccgaagcaagaaaagccataccacaggtattgcaacttatttttgaaatcatcaacgacctgcaacacgatcgctgcttgatgggagccgagtaaaatcgcatatcccgactcggcgaaatcagaaattttatatttcgtcgtaaaccgtcccatcgttatatcggtcattgttacagaacgatatatttagaagctgttttaaatttatagagaaataatattatcattgcaagcaggtatgttccggccatattgcgcccctgtctcgaatctagaatcccttgatttttgtcaatagcccgctattgactgcatatctcggactccaatctgcttcaacataggtctcaatctgtctcggaataaatttaaaacagcttctaaaaaagtatcgatttttgaatcgccgatagaaaaaattgagtaatttggcaacataattcgaaaaatttaaatcatcacttatgaaaacaaaaaattcctttctgcttattttatgcttgctattattttcttctttacatgcccaaaacgaacctgttaagatattggctatcggaaacagttttgccgacgatggaatcgaataccttgacgaaatcgctatctcggcgggaaaacacattatcgtcgccaacacttatatcggcgggtgctctatccaaagacacctcgataacgcccggcacgacaaacacgattacaaatacagaaaaaatatagatgggaaatacaccgaagaaaaaaggaagagtctattggaagccctgaaagacgaggaatgggactacattgtatttcaacaagcaagctctttcgccggacaatacagttcttatttccccgaattgacagaactcatggaatacgtcaaggcgaatgcaaccaatccgaatgtaaaatacgccatgcaacaaacttgggcttatgcaaaagactccaaccaccccggatttttcagatacgggaaagaccaaaaagccatgtatgaagatgtcgtattttcttatgacaaagcggctcaaaaacaaaacatatcgatcgtcatacccaccggaacggctattcagaacggacgtagcagtagcttgggcgatacattctgccgtgacggttaccatctggatttaaaatacggccgctatacggctgcttgtgcatggttcgaaacattcttcggagaatctccgataggcattacctatcgtcccgaaggagtcaccgatgaacaagcatcgatagcacaacatgccgctcatttcgccatactccgtcctacttctgtaaccgatatgagtaacttttaatacacggtatcatgattcaacttattaaaaatattactatcctcttttttctcctactctccttatcggtaagtgcttgttcaaaagatgatttcacccctgcctatcccaaaagcgagggtgtaacccgtctcgtttcctacaacgtaggtgtttttgccaaatatgcaaaaagcggttacaagatgacggctcgcatgatgaaagaactggatgccgatgccgtctgcatgcaagaactggacagttgtacgactcgtaccaaacacgttttccaagtgaaacgttttgccgaactcatggggtgggaatatgtctatgccaaagccatgccctatcaaggaggatattatggtacagggcttgcctgtaaagataaaattctgaaaaaattttccatcgctctaccacaaggcggagaacctcgtaccgtagccgtagccgagctcgaagactacattatagcctctactcacctcgatttgcaaaaagagacacaattggaagaggtagaagtcatcaacaaaacttttaccgaattatataaagattgccccaaaccgatattcttgttaggagatatgaatgccgagccaaactccgagactattcagatgctcaaaacatgttgggacattctttcggtagaaggaaacacatactcgtctcataatcccaacaaatgtatcgacttcattctacaattgaaaaatggtgtgaaatgcgaagtcatcgaatccaaagtacccaccgtattccatacgggcgacgtaacccaagcatcggaccacctgcctatttacgtagacgtgaagattccaaaaaattaagaagctgttttaaatttattccgagacagattgagacctatgttgaagcagattggagtccgagataggcagtcaatagcgggctattgacaaaaatcaaggggttctagatgcgagacaggggctcaatatggccggaacatacctgcttgcaacgataatattatttctcaataaatttaaaacagcttctaatatttcctttactgaacaaacgctctccccggcaaggtgctatcggggagagcgttttagcccgccaatcggtaaaaatggtagatatatcggtaattcatataagtgaggtacacaaaaacgacgtaatttcgtattgaacaaaaatgatctatccattttaaagaaagccttatgaaccgattcatcgctattttagttttcttatagcctcgatatcggcatactgcgattcaccaaatgaaaaccgaaaaagaaaagcagccgggtagtttgtaatcttacatgtatgagacgtatgacactatatattctattaggtataattgtatcgataaccatcgcaggcattgccttcctgcaccagccgagtttcggacggttaccgaaaggcgaacgactggaacgtatcaaacgttcacctaactatcgggaaggagaatttaggaatatcgacacgaccatattaatgacatcgcacaaaagccgactatccgggatatggagttttctgtttcgcaaagtagaaggactacgccccgacgaacccattcccgccataaaaaccgctctccgtaaaatcccgctcgaagaaaatgctttggtatggttcggacactcgtcttatctattgcaagtcgatgaaaaacgtatattggtagacccggtgttctgtatggcttcgcccgtatcgttcgtcaacaaacctttccgagggacagaaatctattctcccgacgacatgccagacatcgactacctcgttatttcccacgaccattgggaccacttggactatcatacggtcaaacaattgaaaggccgcattgggaaagtagtctgtccattgggtgtgggcgaacacttcgaacattggggtttcgataaatcccgaatcatagaactcgattggaaagagagcgcaacactctctcagcaattcatcatacactgtctgcccagccgtcatttctcaggccgaggactcactccaaatcaaaccttgtgggcatcattcttgcttgaaacacccgaccgaaaaattttcatcggaggagatggcggatacggttcccacctcaaacaaataggcgaacgattccccgatatagacttggccatattggaaaatggacagtacaacgaggattggaaatatatccacaccatgccctccttattagagcagacgataaaagacctcggagttcacagagtccttaccgtacatcactctaaatacgctctcgcccgccatcggtgggacgaacctttgaaaaatgcccgcaacttgtctcgcaatgactcgctgactatccttatgcctgttatcggcgaagtggtgaacctcttctgaacgacataatacgaaaagtttcttccctacgaagccgttatataaataaaagaatgacttgccagattgggaataactctcctcaccagacatatatcccgcagcggggaattacatttaatcaccatttgtaaaaattaaaaaagcaaagctctgaaattcaaaaatttcagagccttgcttttgcggtgcggacgggactcgaacccgcgaccccatgcgtgacaggcatgtattctaaccagctgaactaccgcaccagtttcgttttgcgtgtgcaaagatagaacgcttttttcaattctgcaactcttcgattcaaaaaaatagaattatttatttcttattatctccgacagaaatacaaggaaattgaaagagtctcatattcaacgcaaaactcacacaattaaagcaaatgaatattatgccgcgcacactcggcaatttgctcctcgggccaaatactggcctgtacctcgccaatgtgtgccttttgcaaaagaaacatcgagaaacgcgattgccctatccccccgcctatcgaaaggggtaactcgtcattcaacagagcccgatggaaagaaagctgagcccgctcgggacaaccgcaaatatcgagctgacgcaacagagcctctttatctacccgtatccccatcgacgaaagctcgaccggagttcccaacacagtatcccaaaagataatatcgccgttcaggcccaaataaccatcgctgttgggagtcgtccaatcgtcatagtcgggagcgcgcccgtcgtgacgagttccgtcgctaagctgctgtcctataccgataaggaatacggctccataccgacgggcaacagcggcttcccgttctttcggagacaaacgaggatactcttgcaacaactcctcggtatgtataaatgtaatctcgtcgggcaaagtcggtgtaatgtgaggaaactcggcatagatgagactctcgcactctttgataaccttataaatacttttcacggtctttttaagatattcgacattacgatcctcccgtgtaatcgtcttctcccagtcccattgatcgacatacaacgaatgaagattgtcaagctcctcgtgtgtgcgaatcgcattcatatcggtataaagcccgaatcccggtgcaatgtcatatgcacccaatttcacccgcttccacttggcgagcgagtgaacgacctcggcctgtcgcccgcccatatcggcaatgggaaaagataccgcccgctcgcttccattcaagtcgtcgttcagccccgtaccggaaagaacgaacaaaggagctgttacccgacgcaagttaagcgtcttggacaatcgttcctgaaaagcatctttcaacatttttattgccatttcggtagtttcgggcaacaacttcaatttatatttcggaggaattatcagtgacattaggattctctttggttaatattatattcacttcgcataaaatatttgcaaatatatatcatttttccaataacagaaattatattatatcaaattgagaagtcaaacgtacaatattataacttttataaaaaagattgtcgaataattttaattttctgaaaccaaaagacaaaataaattgtttataaatatacacatataaaaattatatacttttgcaccggaaaaatgcgaacataagttgcggttttgccagctctaccttcgcataaaaaaaacaaaattcacactcatggatacaaaccgacttggcattatgcccgagccaaagctctcgaaagaaagcgaacataatcttgttttcaaacccattacactggactctctttccgaaatcgaacccttcctgcaccgacaatgttaccgcacctgcgacttctcgataggcggtatctacatgtgggtagattatttcggctacgaatactgtatttcccaagatacgctgtttatcaaaggaggagaggaagacaatttgcaaaacacggcttttgccgtacccgtcggcaaattaaatctgcaagaatccttaccgttactgaaagaatattgccgccgacacaacgtcccgttcattttgtctgccgtacccgaaccggccgcactggaaattcaacaactttacggctgcccgataaccgaattgcccgactggggagactacctatacaatgccgtcgaccttgcgacattagtcggacaccgttttaacaaaaagcgcaaccgagtaaacaaattcaaaagcacctaccccgattatcgctacgagatgatcacatcacagaacctcccggaaataacagcttttttcgagacctacaaacaagaatatcaaaaaaatagtttgctgttcacgtatgaagaaagtaaagtggttcaagtattgcacgaatatgaaaaactgaaatttgaaggaggcgctctgcgggtatcgggacaaatcgtagcattttctatcggcgaagttataggcgacacgcttatcgtccatatcgagaaagcccgtaaggaagtggcgggggtatacgaagccatcaatcaattctattcggcgcaaatggtcgaaaaacaccccgaagtgaaatacatcaaccgagaggacgatgcaggggatgccggcctacgtgaagccaaactgtcgtataaccccgaaaccatcttaaagaaatacaatatcgcacttaacgaatacgctctgtaaatctatttttcttacataaagacaatttttcatcgcttcctcttccttttctcataaaaacagtcgatatgagtttcaattagccgtttacaaataggcttggttttggacaaagtttatattatctttgcgcagtatgccattataaaacagactcacaaaaaaacaagtatatgaagaaattgctatgggccattcttgcgacggctatcatcgcaggcgcaaatcccgagacatgttatgccaaaaagaaaagtaagaaaaacgataagaaagaacaggtaaaagacacgactgccaaagagtcgaaatatgaaaagctcatcaaaggagctaagactcaaaagggtatgttcacgctacacattacgaatgacaacaaactgctggtcgaagtacccgactcgttgatgaaccgcacgttcctgttgtcgagccgtgtagccgccacgaccgatccaaaaatattcgtcgccggcgaaatgacgaccaatccgttcatgatacgattcagcaaaaacgaacagtcgctcttcatgcacctcgttcagcaccggaacatcatcgacgagaacgatcccatagcggcatctttcgacaaaaattttggagaccctattatcaaagcattcaaaatctctgccaaaaacgggaaagacgtggtagtcgacatgagtgattttttcaaaggcaatgaaaaaatcatcagccctatgcctactccgactcccggcagctcttccaaaataaaaaccggaacctacacggccgccaattcctatatcttaggggcgaaaagttttcctcaaaacagtgaaatccgttcggtattgagctttaccggcgacaataattgcaccgtcactatgcatcgctcgttggttcttcttcccgaacgacctatgacaccgcgtatctacgaccgtcgggtaggattcttttcgagtggtaagaatatctattccagcgacaaagatcgtatagactacaccaaatacgtacatcgctggcgtctcgaaccgaaagaggaagaccgcgaagcctatttcagaggtgaactcgtagaaccggccaaacccattgttttctacgtggacagtgccttccccgataaatggagggacatcgtaaaacaaggcgtggaagattggaacacggcattcgaagccgccggcttcaaaaatgccattattgcacgcgactatcccaaagacgacccggacttcgacccggacgacatgcgatacagttgtgtgaaatatgccgtgaccgacatagccaacgctatgggtccgagttatgtagacccccgcagcggcgaaattctgacagccgatgtcatctggtatcacaacgtaatctctctcgttcacaactggcggttcgcccagacaggagctgtggataaacgggtgagaaaagaaaccttcgacaacgatgtcatgcgcgaatctttacgctacgtcgcttcgcacgaaataggtcatacactgggactgatgcacaatatgggggccagctactccttccctatcgactcgctgcgcagtccttcgttcacgcaaaaatacggaaccacgcccagtatcatggactatgcccgtaacaacttcgtggcacaacccggcgactacgaaagaggagtacggctcacgccgcccattctcggcgtctatgacatttacgctatcaactggggatatcgtctcatacccgatgcaaaaacaccgaaagacgaaatccctacattggataagtggatcgaagagaaaaaggacgatcccatgtacactttcggagcacaacagttccccggagcttacgacccgacagaccagaccgaagatttgggaaacgatcatttccgcgcaggagaaatggcggtttccaacctcaaaatcattatgaaaaatttcgaaaaatggctgttcgacgagggtaaagatttcactacgattcaagagcaatatgccgctatcgtacaacaatacaaccgtcacctgcgacacgtcactccctatataggcggtgtgctcttcaaagaagtgagacaaggagagaatgaactaccctacacttatctggacaaagctacgcagaaaaaagccatgcggtggattttgaaccaagtacgtacctatcgagactggttgatgccggccgatttaatgcaacgaatcaatgcacccaccaactatgccagttcggttcaccgttatattccggcttaccttgtcaaccccacggtgctgttccgcattcaggaaggcggtatcatcgaccccgtgaaaaattacacgctggacagctacctcaacgatttgatcgccgaagtatttaaaacgacttatcagggacgtaaattgaacaacatcgaacgcgacttgcaaaacgagaccatcaatcaattcattcgctattcgtcgctgaaaccggcttcatcggggataagaaatttagacttcaccgacgacatcgatctcgaaagcgaagcattcccttgcagccacgccctttgccgtcatcacgattcggaagagcaatcgttcacccgtatcaacatggggcctgccctatcgtcggccgatatggctccttacatgaccggtgcgctcaaaaaagttttggcgttatacaaacaaaaaagagcggcctcggccgacagtgccacccgcaatttctacgactatcagatcatcacgatagaaaaactatttaataattaaaacccgatgaaaacaaagaggtaagaaaaaacattatttttggagtacatctttgtaaacatatagaatgaaagaatttattttaacacaagaagaaaccgaacgcaccgttttagtgggattgatcaccaacacccaaaacgaagcgaaagcaaacgaatatctcgacgaactggctttcttggcagaaacggccggagcgttgcccgtgaagaaattccttcaacgactcgacacgcccaattcccgcactttcgtcgggtcgggaaaactgtccgaaataaaagcatacatcgaagaaaacgaaataggcatggtcatcttcgatgacgacttgtcgtcgaaacaggtacaaaatatcgaacgggaattgcaagtgaaaatactcgaccgcaccagtctcattctcgatatttttgccaaacgggcacagactgccaatgccaaacgtcaggtagaactggcacaataccaatatctgttgcctcgactcacccgactgtggactcacctcgaacgacaacgaggaggtatcggcatgcgtggacccggcgaaactcagatagagaccgaccggcgtatcattctcgataagatttctcacttgaaagaggagctgaaaagcatagaccggcaaaaaagcatccagcgaaaaaaccgggggaagttggtacgagtagcattagtcggttataccaatgtggggaaatccactttgatgaacctgttaagcaagtcggaggtctttgccgagaacaaactctttgccacgctcgatacgaccgtgcgaaaagtgattgtcgacaaccttccctttctgctctccgacacagtaggatttatccgcaaactgcctacccatctggtcgattcgttcaaatcgacactcgacgaggtgcgggaagccgacctcctgctacacatcgtggatatctcgcatccggctttcgaagaacaaatagaagtagtcaataagaccttacaggaagtctgcgactccaccgacaaacccatgatactcgtgttcaataaaatcgacgcattttcctatgtggaaaaagcggccgacgacctcaccccgaaaacgagagaaaacattacgctcgacgaatggaaagaaacgtggatgggaaaaatgcacgacaactgcattttcatatcggccaaagaaaaaaagaacatcgacgaattgaaaacgctgctttaccagcgggtgaaagagatacatacgacaaggttcccttataacgatttcctgtttcaacactacgacgaaataacgaccgacgaataatcttgaatccataaccgggctactctccggccttttacaaaatttgtccgatgaagaattaccgtaaactcaatattgcagaaatcaatcaactcacgactcaattttgtacggccgagaactggtcgaaaataaatgtagtcgaagggttctctcccgatcatattacccacacccgtttttccggagaaatcgagctggggatattcgaaaaagagatggagcttccgggtggattaaagaaaaaaacgggactccaccacgtcaccttgcacaattgctcgatagggaacaactcactgatagaaaacattcccaactatatagccaattaccggatagggagcgactgtttcatacaaaatgtaaatctcattctcaccgaaggcgaaagctgtttcgggaataataccgaagtatcggtattgaacgagacgggaggtcgggaagtacccatttacaatcggctgtcggcacaactggcctacatcatcgccatgtatcggcatcgccccgacttgatagcccgccttcgagaaatgatagaggcatattccctcgcacaaaagagttgctacggggaaataggcaacggcgtgcacatcgtcaatacaggaactatacgaaacgtttgtatcggagattactgccagatagacgggacatcgagactcgaaaacggtagtatcaacagcaaccgagaggctccggtatacatcgggccgaatgttacggccgaagatttcatcgtcagttcgggagctcatataagtgacggtgtagtaatgtctcgttgtttcatcggacaagcctgccacctcactcatcttttctcggctcacgattcgctctttttcagcaactgccaaagcgaaaacggcgaagcgtgtgctatctttgccggcccctacacggtcaccatgcacaaatcgagtttgctcattgccggaatgttttctttcctgaacgcaggcagcgggtcgaaccaaagcaaccacatgtacaaactcggccctatccatcaaggagtcgttgagcggggctcgaaaacgaccagcgactcatatatcctgtggccggccaaagtaggtgcattttccctcatcatgggacgccatgtcaatcaccccgacacttcgggcatgccgttttcctatctgatagaacacggaaatcgctcttatctcgttcccggtgcgaatctcaaaagcgtgggaacgatacgcgacgcacaaaagtggcccaagcgagacaagcgcaccgaccccgacaagctcgattgtatcaacttcaatctgctcagtccctacaccatacaaaagatgctgcaaggcatcgacacattacagggattgaaacagacatcgggtgaaacgtcggaatgttactccttccaaagcactacgatcaagaacagctccctcaacaaaggaatagacctgtacaccctcgctgtccataaattcatgggtaactcgatcatcaaacgactcgaaggagcaccgttctccgatctgaacgatttgcacgaccggttgaaactgaccgactccctcggagaaggcgaatggatagatctgtcgggattgattgtacccaagcaggctgtcaaagacgaaatagaccgtatcgtcggtaatcccgattccacgttagaagaaaccgaatctttcttccaagccatgcatcggcgttactacgacatggaatggacatgggtttgttcgataatgccccgttggtatggaaaaacagtcgacaggctgtctcccggagatattatccgaatcgtacggcaatggaacgaagccgttgtgtcgctcgaccgaatgctctatgacgatgcccgcaaagaattttcgatgatttcccgtatcggattcggtgtggacggttctacccggcagcgggatttcgatttcgaacaggttcggggcgaatttgagaacgatgcctttgtcaagatggtctgcaagcacatcgaagataaaaccgctttggggaacgagttgatagaccgcctcgaagcattgataacatcgatatctcagcattaaaatgatattgcctccccgctactatctcttgcaacatcacaggaatataatgaaaagctattcaacccctccaccgcttcgtggcatctcgccctcatctggctcacagtcaggcaagcgaaaaatcacattactgagtattcccgaacagctgtgacatttatcgtttactaccagacttttctcaaaagaacaacggtccacgtcgcaaggacaaacggagccgtcagcgtcgttatcccgatgcgcattccggcaatttgtaataccgtacttaacagcacggccgcggtcgcctctccaaaaccttttaaggatgccgtgccgagtgcgatagcacaaagcaccccgttgtaccccaataatccggcttccgcaccgaggattcccatatccggaaaaagagccgctccaagcggcaaaacagcgccccacatggcataaagtccattcaaccgggagttgatccatattcctacgaggaaaaacaaaccagacaaaacggttccaccttgaaacatgacttgtccgatgtgcaaacagaacacttgaaaaaaatctatattcaccggctcctgcacggctacggagtcggacgagagctccaatgaaggaaatacagtccgttccaacaacagcaaaagccaagtgacaagaataaacggtgcagtataccccggcacgaaccgttgacgttgaaacaagcgcatcacccatgtagaaagggcggctcctattatcaataacataaaagcccatacggatatgttcataaacacacccacggcaataccgaccaaagtcccgttaaaaccatacaatccgtttcgtatatcctcgcaggaatatcctgctatccgggcagtcgatgtactcacaaccgttcccaatagagccagacccgccatatacaaagaattacaggctatcccggccaacatcaagactcccgaccaagcattattctgaaacatcacctgcccaatcccacgaaataaaatctttatcttttccaaaatatcattttgccaatccataacccaagaacagaaaaagtacattcgtacttctcatttcaaaatttggccgaaaagtgtaacgattttttgttggacaatatcgagcagaccgccgacatgctcgttgttccactcacctttccgacgaacctcgtccaacacgattcgactctcggcgtatatctctttttcgagcaataacaatctttgggcatatccgttaccttcgggattataaagcaatgccatatgcagataatgcgggccgctgcctctttccaaagaaaacactttgtttttcaatcggttcgaccattcgcacaacggagagcgcacagaatcttccgccccctgcaacagggtcggaacaccatactcgcagccgatccacaccggcaacacgaccgaacagggaggataccccaatatcgtccacatggtagtgaatacaggagactcttcgggtttcacgccttcgatgacaacagaagccgatgtactgcggcgaggtatgaaatcctgatcgaccacccatgcatcggtcgtaaaatcccgtcccaacaaaatgtgataaaacgagcgggaacaaacgcctgtaatccattcgggagtaatactgcgctcggaggcagcacgtgaaaacaaccgggcggcattatcgtaacggatataaccataaccttcgttcggcctccccgatacagaataattggtacgaagcagataaccgtcgggactatcttttacgtcataacggaatacctcgtaactattcacttcgaaataggctgctccacccaaagcatcgaccaccccgaagttagcctccacccctatcggacgaggaagagaatcgagtaaccgggcgaaatcctctaccgtacggcactcgcccaacacttgtttcatcacaaccccttctcggtcggacaacgatgaagtatcgtttttaagattatatgaagccgtattcatgatagcgaatccagaagtattatacccggcccacacttcgttggccatcgtatcgaccccgttcacaagtccgacaaattccaactttcctccttctgcttcgaaatgaacgatacgattattcaaatccgatgcatcgcgatgtttccacaacaacggacgcccgtcgggtgttacccgccccgaaaccacggccgaagtacacgggaacataggtatccagcccaccaaatagacaataataacactcaacaatttacgcataacatcatcttcacatcaatgcgtaaaaataatataagaaatattagaatcaaacatactcgtacaaaaacgtacaaactctgacagaaatcccaatttttaggtattgatactcctttaacggaaatctaactttgcttcacaaaataagtactaaaacatttatgcaaatagccaaagaacatatccgacaaaacattctaaatgctgctttgcccctattctatgccaaaggctattccaaagtcaccattcgtgaaatcgccgacgactcccatgtagggttaagtaatatttacaactactataacagcaaagaagatatctttcgcgaactcgtacaacccgtgatcaatgattttgaaatcatgttagacaaacatcatggaaaaagcggatctgacatcatggaaatgtataccgaacactatctccgggctgtcatagccgaatacatatcgttaatcaaaaaatatcgtaatctgttattcctgcttttatttcgttcgcaagggacttccttagaaaattataaaagagattttgccgaccgttcgaccgaagtcgtcaaagaatattttcgaaacatgaaaataaaacaccctgaactaaatataaacatatcggaattcacgattcacctgcataccgtttggatgttcaccatgctggaagaattaatcatgcataaaaaggtctccgatgaaatagaacaaataataacagaatacatgattttcagtacaaccgggtggagagagcttatgaaaggataggttctctctttttttgaatgattttgaatattgttcgtttttgaaaataacaaataagaatatgaaaagaaaatacgagttcaaaaacattgtagccgaaacactgcttattccactttatatgcgggcaaaagaaagtaggcgaaaagatgcgattctaaaagacaaaatggcggaacaattaatcgcctgcatcgaatacgattattccaaattcgacggagcaaaactgagcgaagtaggttgtgtcgtaagaggtaggtatttcgacgatgctgtccgccgatttatcgataaccattcccgaccgattgtagtcaacgtcggttgtggattagatacacgttgccaacgcattcatcgggaaaacgatccgacaaaatattacgaactggatttacccgaagtaatctctttgagacgagaattgattcccgaaccggaatacgatacctatatatcttcttctttattagaaacaaaatggttagagtgtttgaaaacacaacaccccgattgtgatttcatttttatcatcgagggcgtactcatgtatttctatgaagaacaagtgaaggcagttctccataacatagcttcccatttttccggcggggaagtacaaaagagatcaaccattaactcaaaaactcaattcacatgacaccaaataaaaagaaagaaggacttgcccgtctatttcaaatagcaggtgagcgaaaaggcttactgatattatccggtatattgtcggcaatcagtgctttgtgtatgctcgtaccttattggtcgatatatgaaattctcaacgaactcctatcgaaagcaggaaatctaggttcaatcgacagcgatttactcatatactgggggtggatagcttttggaggattaatcatcggattgatactactctatgcatcactcatggcatcacacgtagctgcttttcgcatcttatacggactgcgtgtaaaactatccgaacatatcgggaaattatccctgggatttctcagcgatacctccacaggtgctatcaaaaagacaatagaacaaaatatcgagaaaatagaatccttcatagcccatacgattcccgacatggtaaacgtcgcggtaaccgtaattttcatgtttgttattttcttttcactcaacggttggttagctgcaatttgtcttgcttgtatcgtattaagcattggattacaatacatcaacttcatgggcaaaactgcaaaaacatttaccgccaactattttgacacacaggagcgtatgagcgcatcggctgtacaatacgtacgaggtatacccgtcgtgaaaatattcggacagagcgtaaaatccttccgacaattccacgacgaaattcaaggatataaaaaatgggcattgaaagtttgcgatacatacgaaccaggcatgatcactttcaccgtgttgttaaactccatcgtctcgcttattatccccgtcggtctgctactcatcagtaaccaaccacacaatatcgcactggccgccgtatggctatttttcatcatcatgggacccggtgtaacttcaccggtatataaattaatgtttctaggaggaggtactcgcgaaatcgacgaaggagtaaaacgcatagaccgaatactcgacgaaaaacccgttccagaaacaaccttaccccaaactccccaaagttatgacatcgaattcagagatgtcagtttctcctatgagagcaaagagcaagtcactcgcacagaggcgttacgtcatatttctttcaaagcgtcacaaggcgaaatcacagcactcgtcgggccgtctggttcagggaaaagtacggtcgccagcctcataccccgattttgggacgtcggcgaaggcggtatctacataggaggagtcgatgtgagaaacatcaaaaccgagggactaatgaatcttatatctttcgtctttcaagatacattccttttttacgatacattgtatgaaaatatagccgtaggttcacccaatgccacccgagaacaagtagaagccgccactcgtgccgcccaatgtcatgagttcatttcaaatctgcccgacggatacgacacccgcattggcgacaaaggagtatttctatcgggcggtgaggcgcaaagaatctgcgtggcacgggccatactgaaaaatgcacccattctcgtactcgatgaagctacggcttttgccgaccccgaaaatgaatacaagatgcaacaagccttgcaacacctcatcaaaaacaaaaccgtcatcatcatagctcaccgattatcgtccatcgtatcggctcaacaaatcgtcgtactcaaagagggctcgatagcgcaaatcggtacacatcaaaagcttagctccataccgggagtttaccgacagatgtgggaagcatacaccgatgcattccaatgggaattaaaaaccgaatataaagcttaacataacattcacaagaatatgaaaaagaaaaacataatcaactctatactacaaaatacccgtatgcccgaagggttcttcggtagaataattctacgaggtatgaacaagggacatgcttcactctcccgctgggggctctcccaaatagaatggaaatccgactggacgatactcgatatcgggtgcggaggtggagcgaatctgaaacgcatggcagacttctgtccgcaagggaaaatatacggtatcgatatatcctccgaaagcgtaaaattcgctcgaaaggaaatcaagaaactgctgaatactcgttgctttatctcgcagggaaacgtaatgaacctaccctatgagaaaggaacgttcgatctgattactgcttttgagaccgtctatttttggggaaatctgcaaaaaactttcaacgaagtacaccgggttttgaaaaatggaggactcttccttatctgctgcgaagctagcgacccctccgacgaaacatggacaagccgtatcgacggcatggtcgtccattctgcccaagatttagagtcctgtcttgcccggtgcggattctcaaatatcaccacacaccgtagaaataaagaaaatatctgtgtaatcgcacaaaaaattcagtaaatcatgaacgctattcaaaatataaccatcggccaaccggatcgtttgaaaaagcccgttggctataccatattatccaatttggtaaatatcatacccttttgcctctctatcgaagctatcgacgttattttccgagctttcgacgggaacggtacaccactcgataccactcgattatggacaatttccggtatactcgtcatatatgtagccgtcatggtagcggccgaaagagcctcctaccgggcgaacttccgtaaagcctatgccatgagtgccgacggacgcatcgctctggcagaacacttgcgcaaattatcactcggatttctatctcgccgtgatccgggcgacctgtcctctatgattatcaccgacttcaccatggccgaaaccggcatatcccatcatctgcctcaactaatgggtgctcttgtcatgcctgtactggctttcctgtctctcctctggataaattggcgcatgtcggtagctatgttcatagctcttcccgtagccattctgatcttatggctcagtacaaaattacaacaacggctcagcagtaaacagatagaagcgaaaataaacgcaggcaaccgcatggaagaatatctacaaggtattcgggtcatgaaagcttataatcttttaggcgatcgcttcgtcagattacgcaaagcgttctccgatttacgaaaagcctgcatacgacaagaagccttgttgggcccgttcatcatgctctctatcacaatcgtccgagccggactaaccttaatgatcctgtgcggaacctaccttcttattggaggagaactcttgctaaccactttcgtcctttttctggtcgtcggctcacgggtattcgacccactgacttctgccttgacaaacttcgccgaatttcgttatttttccattgccggaggacgcatattaaatttaatgaaagaacccgaaatgaaaggagatagacccgctcccaacggcggtgacattgaatttcataatgtatctttttcttaccaagataaaaaggttctgcaccatattaacctcactttgaaacaaggttccctaaccgcactcgtgggaccgtcgggcagtggaaaaagcaccttgatgaaactctgtgcccgattctatgatcctggggaaggtactgtttcaatgggtgggcaagacttatctacattagagcccgaatcccttatgaaaaatatatctatggttttccaagatgtttatctattccaagatacgattcgcaacaatatccgattcgggaaaaatgatgctaccgacgaagaaattatcgaagctgccaagaaagcacaatgtcacgaatttatcacgaagctttccaaaggttacgatacgatgataggtgaaggaggttgtactttgtcaggaggagaaaaacaacgcctcagtatcgctcgtgccatcttgaaggatgctcccatcgtattgctcgacgaggcgactgcctcgctcgacccagagaatgaagtggaagtacaacgagccattaacaccctgatagctggtcgtactgtcattgttatcgctcaccgtctcaaaacaatctgtaacgccgacacgatagtcgttctcgatgaaggtcgcattgtagaaaaaggcagacacgaagaccttctgaataaccacggattgtatgctcatctctgggatatacaaactcaaattgccggttggaaattataaggtatcgcaccgaaacaccgttcgagaagataaaggatacaaagggggaaccaattaattggtttcaccctttgtttatattatctttgcatcgggaggtgaaaataaactttcggtacgatcgagaatgtctgctttcgctccctgcttgcacggtatttacataaaccatcaatggaaaactagttatggaatatatttttgaattggagatgcaagtgcgcgactacgaatgcgacatggaaggaatcgttaacaatgccatctaccagcactatctcgaacatacccgtcacgaatttttagcatcatctggaatctcatttatcgagatgcacgagagaggtgtagatccggtagtcaatcgcatcgaaataaactataaaacaccgctccgcagccgcgacaaattcatcagcaaattatacatgcgcagggaaggcatcaaatatgtcttttatcaagatatttacaagacttcgggagaaacatgtatcaaagctgtcgtggaaacggtgtgtactgtaaacggacgaataagccgaggtgaagaatttctcccttatttcgagaagtatctgcaataatccttttctcattcaagccgttatggaacaagaggtgatatatcgtattgcattatcccgattaaaaggaataaacaaagccctcgcccagcacattcatgaaacggtcgaaagcctcgaaactttctttgaattaccagaatcccaactacaaaaaattaccgggataaagggaaggattcttcacgaagacaaccggcaaacagccttacaggaagcccgcaaggaaatggaatttatccgaaaagggtgcatcgaacctctctatttcacagagccgaattatccccaacggttactcgattgtatcgatgccccacccttgctctattatcggggtaatgccgatttaaactcttctaaaataatcagtatcgtgggaacgcgccgggcgaccgaatacggtaaagatttctgtgaaaccctgattcgggatttatcggaatattttcctcaactggttatcgtcagcggattggcgtatggaatcgacatttgcgcccaccgttgtgccctgcgacatggcttaaacacgatcgcagtccttgcacatggattggatcacatctatccggcgaaccaccgttccacagccgtagaaatggtatcgcacggaggattgctcaccgaatataccggctaccaccgtatgcatccggcattttttgtcgcccgcaaccgcattgtcgccggacttgccgatgccgttatcatcgtggaatcgagggaaaaaggcggggctctcatcactgccggtatagccgaaagctaccaccgtgatgtattcgctctaccgggaagcatacaatccgaatcgtcagccgggtgtaaccacctgatacgccggaatcgggcagccttaataacctcggccgacgacctcgtcgaagccatgtgctggaacgccccacggaaacaagccgtgcaacgctcgctttttccagaactcaccgacgaagagcaagttgttacgaactatctgacgcaaaagggagaaggacagataaaccgtatgaccgtcgacctgaaccaacccttgtcacaactgctctccatactggtggaactggaatttaaaggtgtagtaaaagccttaccgggaggcatctataaattataggccataaaacgaaagtggagaaaagccgtatatcgacaacaacttttctccacctatacgtttttcgtgcaaatctttatagataaggttgtgtatcgctatcgcatccttgctgctcttcgcaacagtcgcaatgtccgtcacaatgttcttctttcagttccaattcgagagtagcatgctcgatacccaaatcctgtaaatcgtgcttcaaccgatgttttacctcgtgcatgtgcgtaatatctttcacaacgatatgtgctgtcaatgccgtttgagtcgtactgatggcccaaatatgcagatgatgtacattaaggacatctggatcggacgatagaacggtttccactttctgtacatcgattccttcgggcactccatcgagagcgagtcgtaaactctcttgtaacaaatgccatgtggaataaagaatcacaagccccaccacgatacctattatcgggtcaatgacattccaccccgtatatttgataacaatccccgaaaccaacactccaaccgataccaaagtatctgccgccatgtgtaagtaagctcctttgacattcaaatctttcgacttgtcagcaaaaaaaagataggccgtaaaagcattgataacgatgcctatcgctgctacccatgcgatcgcaccaccgtcgaggggagtaggattactgaacttctcgacactttcatacaaaataacggcaacggcaacaaacagaatggcagcattcaatagcgaaactaatacggtacttttcttatatccataggtatattgcaaagaaggtttagccatcgataaccgcaaagcgaacatcgccaacacaaggctcacgacatcgctcaggttatgacccgcatcggataacaaggccaacgaatcataataaaaccctgcaccggcttcggccaacacgaaaacaatattcaatacgataccgacgataaacgaccgattcaatttctgcatatcgggtgtcgggtgaacatgatgatggtggtgatgttccataactgctaatttagaaaggtttgaatcccatgatttcacgaacctctcgcaatgttttcgatgcactttcgcgagctttctcagctcccatcttcacaacccgagccaaataggcctcatcgttttgtatctccaaaaaacgttcccgaatcggcaaagtgactttaagaatatcctcggccagctgcttcttcaaatcgccataacgaatttcacatgtattgtatttctcttcgaaataggctaccgtgtcgggagcagatacgattttaagaagagtgaacagattttccacaggttcggctttgggggaattgggcacttgcggaccttcgtcggttaccgcccgcataatcttttttctcaatgtcttttcatcgtccaccaaataaacgcagttgccttccgacttacccattttgcccgatccatcgagtcccggaacttttatagggtcgctgccgaaattgaaattctgaggttcggtaaaatactcgacaccataagtagaattaaatcgacgggcaaaacggcgtgtcaactccaaatgctgttcttggtctttccccaccggcacataattagcatgctgaataagaatatccacagccattaaagtaggataagtaagcagaccggcattcacccgtttgttagaattacctcctataatctcgtgttctatatcctcatcgttattggtctttattcccaactgtttacgagccttatctttaaatgaagccgtccgcatcaactctccgatacctacgtgcatattcattaacaaatacatttcggaaatctcaggtacatcgctctgtacgaacaaggtcgatttctcaggatcaagaccggcagccaaatattcgcaaaggatattccgaacattctcatgtagagttttcggatcgggatgcgtagtgagggcatgtaagtcggcaataaaaaaataactattgtatttcgcctcttcctgcattttgacaaaattacgcaatgctccgtaataatttcccaaatgcaaatttcccgtggaacggattccactgacaacaatttctttcatatatatagttctaacatttcaacggctcatcaaaatacgcttgctttcgtattatctattgcaaaaatacaaaaaatagccgcaaaatagtacccggaataatgaaaaagcgcagcagtaattcatttaaagacatatcttccccggcttgtcggacaatcgaggatataattgctcgacgatagcaggagtccccaccacaataggaacattacgatcctcccggaatgaacgaaccgtacccccggcctcggttacaatcaatataccggcacaaacgtcccacaaatgcaaattgaattcccaatacccgtccaagattccagcagcgacacaacataaatcaaatgctgccgatccttgacgacgcaccccgcgaaccattggtaaaatacgggccagattgtcgagattattatcggggttacgatctttatctatgggaaatccggtagaaacgacagactcctgagtgtcattctttcctgaaacatgaatagaacgcccgttcaacatagctccttttcctttacaagcctcgtacagttcgttcaaatatggagcatagaccacccctaaaacagtttcacctttacattggagaccaatagagactgtaaatataggcagcccttgactataattggttgttccgtccaaaggatcgatcacccaacaatactccgaatctcccgcatgcataccactctcttctcctaatatagcatgttcaggataggtcctctttatttcgcctatgatataacgttcactttctttatctgcgaccgtaaccacatcgtgcatattgaacttggtctcgatatgcaagtgattccccctgaaataagaaagttgtattttaccggcttccttcgcacagtttcgggcaaaagcaagcatctgctccattctatccatacccgttaaaattaatcccggctttcttccagaaggaaagaaagccgggtaatctcttatccaatctctattttaatccagatcctctacctcttcgataggaagctgacgtctaaaaatttctcgaaacgaaatcaacgtctcggtgcgagataaaccgataggctgtaatttcgtatgaataatttcaagtaaatgctgattattacgtgcgaacaatttgatgaacatatcatactgtcctgtcgtaaaatggcactccactacctcgggaatcttacgcaactcttccactacatgggaaaaatcacccggatttttcaaataaaagcccatgtaggcacacgtttcaaatcctattttatttgaatctattatgtattccgatcctttaagaatccccaaattcgtcaatttttgtacccgttgatgaatagcggcccccgatacattgcattcccttgcaacttcgagaaatggtatccgagcgttcgaggctacaagtttaagaattttgtaatccaactcgtccaattgatgatgtcccatggtctgtttacgattttttacaactgttttattatttattttgcaaagatagtaataaatttacactattcatctaatgaacatgttaattttgtatgaatttactctaacaattatttttcggcaacatcttcaaataaaaggaattacaatttgtaagcatgcgccgggacttttacaaattacacgctctatatatcgagcgaaacctcaggtggttcggtaaaaaactgactcgtctttttctctacttaccctttgctcatacttacagaacataggatacgatccgtataaaaaatggacagattcattttatcctactcttatctttgcctatatttgtactatgaaggttcggcatagccaagctggaaataggatttccgtttgcctctgctctctcctttcgctatatttgtataaaatttaatcaaatcgatatatgatacaaatttcacaagtttacgcaaacgatagcaactctttaaaattcatagaacgcatttatacagaatcttttcccccggacgaaaggagagatttttccgacgtgatacggctgctcgaagaaaacgacgattttttcatcgttcttctatctgatgaaaacaaagcagtcggatttatctcttattgggaatggaatgacttttcctatgtcgaacacttcgccgtagacagcagttgcagaggatcgggctatggggcgactgccatgaccgaattgctaaaactcattaacaatccggcagttctcgaagtagaaaaaccattagacgatatcagtcaacggagaatacgcttttacgaacgattgggtttcgttttatgtacacgtccatatacccaaccgccatattctcctgaaaaacaaccgttagaactataccttatgtcttttggaaagatagatctaaatcaagttttcgatactgtcgcgtctcgaatccatcaaaaggtttacggtgtcgaataacatattctccaatctgaaaaaagtttgatatgtaaaatgttaaaaatgaaatttaatatattaaaatccaacgaaaagatggtttcttaacaacattatattatttttgtacaaaaatatgccgtgaggcaaaacgttttattatgaaaaatcattcttttctgaaatattgcacgagtatactgctaatatttatcgcagtagcatgtactactggaaacaaagagcagaaaattgtcacggtaactatacaacctcagaaatattttgctgaaaaaattgcaggagaccggttcaatattaactgtatcgttcctcccggcagtaaccccgaggcttacgacccttctccgtctcatctggttcatttgggcaaaagtatcgcctatttcaaaatcgggcacataggcttcgaacttgcttggatggataaattggaacagaacaatccgaatatgaaaatattcgatacttccgaaggtatcgatatactttcaggtacgcacgagcacaacgatgccgatgtacaccaccatcatttcgatgccgatccgcacacatggagttcccccaagaatgtgcgcatcatcgcccaaaacatgtacgaggcgtttgtcagtatcgatcccgacggagaaaaagtatttcgcaagaactacgaagaactgctcgacgaaataaatcaagtagattccatcatgaccgaacgactctcaccggtcagcggaactatgttcgccatatatcatccatctctcagctatttggccaaagactacaacctgcaccagctcagtttggaatacaacggaaaagaaccgtctgctttttatttgaaaaaagccatagacatagcacgcgaaaacaacgtgaaggttatatttatccaacaagaattcgatgccaaacaagccgaatcattcgcatctgaaataaatgcgaaggtagttcctattaacccgcttagctataattggagcgaagaacttttacatataaccgatgccattgctggaaaataaaataatagccatagaaaacgtatggctctcttatacagacaagaatatcctcgaagatataaatctggatatttatcaaggtgattttcttttgattaccggccctaacggcgggggaaaaacgtcattgctgcgtacgattctcagattacagagtccgactaagggacgaatttcctttttcagacaaggagagcccgtatcttcattagatatgggttacctgcctcaaaaaaacagcatagacagccgatttcccattaccgtagaagaagtagtagcttcgggccttatgggtaacacccaaaagggaaatacaaaatttgactctaaaaaagaaatagacgaaatgctcgacctcatgggtataaccgctttgcgcaataaacccatcggggtgttatcgggaggacaactccaacgatctttgttcgggagagctcttatttctaagccggaaatgttaatattggacgaaccggcatcttatatagatcgtcaattcgggaaccgtatgttcgagattctacgggatttatcgagtaacggaacaaccatcatgatggtatcccatgaaatagaaccattcataacattgtccaatcgcaatctatatattaatcacattttgggagaccgctaaacccacacaactatcggcaaagtcacccgcgagacatttgtttccataaaataagcgaggcggatagaagttatccgcctcgcttattttagagtcttttcacttattaattagaaaaatcagttacattcttacgattggcaaaaacacgatcgaattcctctttggatccgacaatgagtttgtcaaactcacgttgccccgtaccggcaggaatcaagtgtccgcagataacgttttctttcataccttccaacgtatctaccttaccattgatagcagcctcgttgagcacttttgtcgtctcttggaaagaagcggccgacataaagctcgatgtttgcagggctgcacgggtaataccttgcagaatctgttcggaagtagcaggaattgcatcgcgcacctgtatcaacttcaagtctttccgtttcaaagccgaattttcatcgcgcagtttacgcgccgtaacgatctgtccggctttcaacgtttgagaatcgcccggatcggtaacgacttttttaccccaaatacggtcattttcgtccatgaagtctcgcttgtcgacaatctgttgttccaagaatcgagtatcgcccggatcgagaatttgaaccttacgcatcatttgacgaacaatcacctcgaagtgcttatcgttaatcttcacaccctgcatacggtacacatcttgaacttcgttcacgatatattcctgtacagccgtaggccctttgatggccaagatatcggaaggagtaacggctccatcggaaagcggtgttccggcacgcacgtaatcgttctcttgtaccaatatttgtttggaaagaggaaccaaatatttcttcgtctcacccgtcttggaaaccacagagatttcacgattaccacgtttcactttcccgaaaatcacctcaccgtcgatttcagaaacgacagccggattagacgggttacgagcttcgaacaactcggttacacgaggaagaccaccggtaatgtcaccggctttaccgaccgcacgaggtatcttaacgaatacatctcccgttttaatcgtatcgccgtcttcaatcatcaagtgagctcccacaggcaaagcatagctcttgattacctgcccggcttcatcgagaatttgtgccgacggtacacgggtacggtctttcgattcgataatgatcttttctttcaaaccagattgttcgtccgattctacacgataagtaacaccttcttccacggcttcgaagttgactctaccgcccacctccgaaacaattaccgcattgaaggggtcccattcgcaaatcatatcgcctttcttaacggtatcgccgttgttgaagaagagttttgatccatagggaatattggcagtcatgagcaccattttcgtattcgggtcgataatacgcatttcggccaatcgacctacaacaatctgtactcttgtaccgctatcggatacattttctaccgtacggagctcgtctatctccaaaataccctcgtaacgagacgtaacgctcgatacagccgcaatattcgaagcgataccaccgacgtggaacgtacgcaatgtaagctgtgtacccggctcaccgatcgactgcgcagcaattacacccacagcctcgcctttttgaaccatgcgattattagaaaggttacgtccgtaacatttagcacaaacacctttcttcgattcgcacgtcagaaccgaacgaatctccacctgttcgataggagaatcctctatcttcttggcaataacttcggtaatttcttcaccggcgtgaaccaatatctcgttagtcaacggattcactacatcgtgaacagacacacgtcctaatattctttcacccaaagaagctacgacttcctcgttattcttaatctcggtacaaaccaaaccgcgcaatgtaccgcaatcctcttcatggataatgacatcgtgagctacatcgaccaaacgacgggtcaaataaccggcgtcggctgtcttcaatgccgtatcggcaagacctttacgagcaccgtgcgtagagataaagtattccaacacggaaagtccctctttgaagtttgccaaaatagggttctcgatgatctgaccgccttctgctcccgacttttggggtttggccatcaaaccacgcatacccgacaactgacgaatctggtccttagaaccacgagctcccgaatccaacatcatgaataccgaattgaatccttgattgtcggcagaaagttgcttcatcaaaatatcggacagacgagaatttacatgagtccatgtatcgataatctgattataacgctcgttataagtgatgaaacccatgttgtagttgttcatgatctgttccacctcggcgttaccttcggcaaccaaagtctctttttcgggcggaacgagcacatcgcccaaattgaaggacaaacctcccttgaatgccatgtagtaacccaagttcttgatatcgtcaaggaactgagccgaacgagtcacaccgcaaactttaatcaccttaccgataatatcgcgcaacgatttcttagaaaggatttcattgacatagccgatctcctgaggcacatactgattaaccaatacacgacccaccgaagtattctcgaccatgtgctcgataatattaccgtccttatcgacatctttcacaacgaccgataccggagcgtgcaacgaaactttaccttcgttgtaagcgatttcggcttcttcgggaccatagaatttcagtccttcacccaacgaacccgggcgaagtttggtaatataatacaatcccaaaaccatatcctgcgaaggcacagtgataggtgcgccattggcgggattcaagatattatgagcacccaacatcaacagttgagcttcaagaattgcctcgtttccgagaggcaagtgaacagccatctggtcaccgtcgaagtcggcgttaaatgccgtacaagcgagcggatgcaactggatagccttaccttcgatcattttgggctggaacgcctgaatacccaaacggtgcaacgtcggggcacggttcaacagcacggggtgtcccttcatcacatgttcgaggatatcccataccacaggctctttgcgatcgacgattttcttagccgattttaccgtcttaacgataccacgctcgataagtttacggataataaacggtttatacaattcggccgccatatttttgggcaaaccgcattcgtgcattttcaattcgggacctacgacaataaccgaacgcgcagaataatcgacacgtttacccaacaggttttggcggaaacgtccttgcttacctttcaaactatcggaaagagactttaacggacgattggcctcggttttcactgcgctggacttgcgagagttgtcgagcaaagaatccacagcctcctgcaacatacgtttttcgtttcgaagaataacctcaggagccttgatctccatcaatcgtttcaaacgattgttacggataatcacccgacggtacaaatcgttcaaatcggaagtcgcgaaacgaccgccatcgagaggaaccaacggacgcaattcgggagggataaccggtatgactttcaaaatcatccattctggccggttcctacccttagaagcccggaacgactcaacgacttggagccgtttcaaagcctcggttttgcgttgctgagagccatcggtgctggcacgatgacgcaaatcgtaagacagctcatcgagatccaaacgagaaagcagatcgtagatagcttctgcacccatcttagcgataaacttattcggatcggtatcttcgagcatctgattttcacgaggaagtgaatccatgatgttcaaatattcctcttcggaaagcaaatcgtaagtagccaagtccgattgaggtcccggctgtatgacaatataacgctcgtaatagataacagcgtccaatttcttgctgggcaatcccaacaaatacccaatcttattgggtaacgaacggaaataccagatatgagctaccggaacaacgagctgtatatgccccatgcgttcgcggcgcacctttttctctgttacttccacaccacatcggtcgcacacgatacccttgtagcgaatacgtttatattttccgcaatgacactcgtaatcttttacaggtccgaatatacgttcgcagaaaagaccgtcccgctcgggtttataggtacggtaattgatggtttcgggtttcaagacctcaccgctcgaattttccagaatctcttcgggcgaagccaaaccgatcgaaatcttcgaaaagttactctttattttgttatcttttctaaaagccatatgtttttaatgtataaagagttattggccgactgtcacatttctgcgacagtctggccattggattttatttattctaagttgacgctaagaccaagacctctcaattcatgcaataacacattcagagactcgggaataccgggtgtcggcatgggttcgcccttaacgattgcctcataagctttcgaacgtccaaccacgtcgtccgacttgatcgtcaggatttcctgcaaaacatgagaagcaccgaaggcttcgagagcccaaacctccatttctccgaaacgctgaccaccgaactgtgctttaccacccaaaggttgttgcgtaatcaaagagtacggaccgatggaacgggcatgcatcttgtcttcgaccatgtggcccagtttcagcatatagattacccccaccgtagccggctggtcgaaacgctcgcctgtgccaccgtcatacaaataggtcttaccataacgaggaagtccggctttatcggtccatgtattcaaatcatcaaggcttgccccgtcgaaaatcggagtcgcaaatttttctcccaactcggctcctgcccaacctaaaacggtctcgaaaatctgtcccaagttcatacgagaaggcacacccaacgggttcaaaacgatatcgaccggagttccgtcagccaagaaaggcatgtcttcctgacgaacgatacgcgaaacgatacccttgttaccgtgacgtccggccatcttatcgcccacgcttattttacgcttcttggcaatatacactttggccatttgcacgataccagaaggaagttcatctccgatagaaatatcgaatttcttacgacgcaactcggcatcatattctttatacttcttcaaataattgatgatagtagcgcgtatcaattcgttcttagcggcatcggtcgtccacttacttacctgtaccgtcgtataatcgattttattcagaacagcctgagtgaatttcgttcccttcgacacgacatcggttcccatgaaatctttcacaccctgagaaaccttaccttgtgtcaaaacaagcaacttatcgatgagaatggctttcaaaccgttcatcttttcttcatattcctcgtcgagtttcggaagaatggctttgtcgctgagtttcgattttttctttttaatggcacgagagaatagattcgtaccgataacgacacctttcaacgaaggagtagctttcaaggaagcatctttcacatcgccggccttatcaccgaaaatcgcacgaagcaatttttcttcgggagaaggatcggattctcctttcggagtaatcttaccgatcataatatctccgggattaacctgagctccgatacgaataataccacgttcatcgaggtctttcgtagcatcctcgcttacattgggaatatcggaagtaagttcctccataccgcgcttggtctcacgcacttccaacgaatattcatcgacgtgaaccgaagtaagaatgtcttcacgaacgacacgctcgttcaacacgatagcatcctcgtagttatatcctttccacggcatgaatgcgactttgaggttacgtcccaaagccaactcgccattctcggtggaataaccttcggtaagaatatccccggctttaacccggtctcccttgtggcagataggacgcaaatcgatagtcgtgctctggttcgttttacggaacttgggtatgatatattcttttacggaatcttcaaaacttacaaattcttcatcttccgtacgatcgtagcgaatacgaatcgtagtggcatcgacaaactcgataacgccatcaccctcggccgtaatctgcgtacgagaatcgcgaatcaactgaccctcgatacccgttcccacaataggagcttcgggacgcaataaaggaactgcttggcgcatcatgttcgaccccatcaatgcacggttcgcatcatcgtgttcgaggaacggaatcaacgatgccgcgatagaagctatctgagtaggcgacacgtccatcaaattcacctgatcgggcgacacgacggggaaatcggcctccaaacgagattttacccgattgcggacaaatgtaccgtcgtcattcaacggagcattaccctgcgctaccaccaagttttcctcggcttcggcggtcaaataaaccacaccctcgggcgacaaatctactttcccattttctacttttcgatacggagtttcgatgaagcccagatcattgattttagcatatacacaaagagacgagatcaaaccgatattaggaccttcgggagtctcgataggacaaagacgtccatagtgcgtatagtgcacgtctcgaacctcgaaaccggcgcgttcgcgagacaaaccgccggggcccaaagccgacatacgacgcttgtgagtaatttcggccaacggattcgtctgatccatgaactgcgacaaagcgttcgtcccgaagaatgtattgataacagatgatatcgtctttgcattaatcaaatcgatgggagtaaacacctcgttatcccgcacattcattctctcacgaatggtacgtgccatacgagccaatcccactccgaactgattatataattgttctcctaccgtgcgcacacgacggttgctcaaatggtctatatcatcgacatcggtcttcgagttaatcaactcgatgagatatttgataatttcgatgatatcctctttcgtaagcacctttacatcgggcgaggtagagaggtttaatttcttatttattctataacgtcctacttctcccaaatcgtaacgtttctccgagaagaaaaggttggtaatcacctcgcgggcactggcatcatcggctggctcggcgttacgtaattggcgatagatatacaacacggcttctttctccgagttgctggaatccttttgcaacgtattgaatataatcgagtaatccgacgtgttgctatcctctttatgcaacaagatattttggactcccgattcgataatatcggcaatatgcgattcttcaaggacagtttcacgaggaatgacaatctcggtacgttcgatagaaacgacctcaccggtatcctcgtctacaaagtcttccacccaagccttaacgacattacccgccaatctgcggccaatggcttttttcaaacttgctttggagactttcaagtcttctgccaaaccgaatatttcgagaatatccttatcggtctcgaaaccaatcgcacgcaacaaagtggtaacgggcaactttttcttccggtcgatataggcatacatcacgttgtttatatcagtggcaaattcaatccaagagcccctgaacggaataatacgtgccgaataaagttttgtaccgttagcgtgtatactttgtccgaagaacacgcccggagaacggtgcaactgcgaaacgacaacacgttcggccccattgataacaaacgtacccttagcagtcatataagggataggacctaaataaacgtcttgaattaccgtagcgaaatcctcatgatcgggatcggtacagtataatttcaatttggcctttaacggtacgctgtaagtcaaccctctttcgagacactcttcaatcgtatatctcggcggatcgatataatagtccaaaaattcgaggacaaagttattgcgcgtatcagcaatggggaaattctcggcgaataccttgaaaagcccttcgttttttcttttttcaggcggggtgtcgagttgcaaaaagtcttgaaatgacttcaactgaacttcaaggaaatccggataaggaagcggattcttaattgaagcgaaatttacgcgtggtttacctattgtagaagacatttataaaagggattaagtgaacttaattaaaaatatatacacaaaaaggttaagaatcaccgagtgagatgattcttaaccaaactctctgattaacagatgtattatttaagttcaacttctgctccagcttcttccaattgttttttcaaagcctcagcatcagccttagcaagaccttctttgatgttgttaggagcaccgtctacaaggtcttttgcttctttcaagccaagtccggtgagttctttcaccaatttaacgatagcaagtttatttgcaccagcagctttcaaaacaacatcgaaagatgttttttcttcagcagcagctccaccagcggcaggagcagcagcaacagcaacagctgcagcagcaggttcaataccatattcgtctttcaaaatttgagcaagttcgtttacttcctttacggtcaagttaactaattgttctgcaaaagctttcaaatctgccatttttgtatgaattaaatgttattattcgtaataatgttttttgtataaattttatctttctgatagagtctgcaatactccatgtaaggtagaaccacttgactgaagagccgatacaacattctttgcaggagattgtaagagggcgataacctcagcaataagttcgtttttgctcttgatagcaacaagtgcatcaagctgatcggctccgatataaaacccttcttctacataagcggcttttagaaccaaatcttcagaagtctttctgaactccttaatcagctttgcaggtgcattgccaacatttgcaaagaacatcgttgtagaacccttcaaagaaccgtacaagggcgaataatcggtatcgagcccttccagtgccttgtgtaacaaagcgttcttaacaaccatcattttgataccttctttgaaacatgcacgacgtaaattgcttgttttttcagcattcaacgttgcagtttctgcaaggtagaagcagctgtactcctttacagtttctgctatttgcgcaataatagtgcctttatcttcctttctcataattccttgttttagatctcgtcaactgatttaggatcaatcttgatacccgggctcattgtactcgaaagataaatactcttgatataagtacccttagcagcagtaggtttcagttttatcaatgtcgaaacaaattctttcgcattatcgcgaatctgatcggcagtaaacgaaatcttacctatagaggcatgtactataccattcttatcgactttgaaatcgatttttccttgttttacttcttttacagctttagcgacatcgggagtcacagttccgctcttaggattaggcatcaaaccacgagggcctaatacacgtcccaaagcaccgatcttacccatgatagcaggcatcgtaatgattacgtcgatatcggtccaaccgcctttgatcttctcgatatattcgtccaatcctacgtaatcggctccggcttcctttgcggcagcttcggcatcgggagtacaaagtaccaacacacgcacttgtttacccgttccatgaggcaacgatacgacacctcttaccatttgattggctttacgaggatcaacgcctaagcgtacatcaatatcaagcgatgcatcgaatttggtataagtaatatcttttaccaattgagatgcctcgccgagtgagtaggccttccctgcttcaatctttgctaaagctaacttttgattttttgtcagtttacccatttcaattgaagtttattagttatttaccgggaattccccttttacggtgatacccatacttctcgctgtaccagcaaccattttcatcgccgattctaccgtaaaacagttcaaatcgaccaatttgtcctcggcgattgcttttacctgttcccaagtaatctctcctacttttttacggttaggctccgcagaaccgccttttactttggcagcttccataacttgaatagctacgggaggagtcttaacgacaaaatcgaaagatttatcgctataataggtaattacgaccggcaatactttaccggctttgtcttgggtacgggcattgaattgcttgcaaaactccatgatgtttatacccttagaacccaatgcaggtcctacgggaggagaggggtttgctgcaccacctttaatctgtaatttgatctgtccagcaatttctttagccattgtttttaattttgatattattaaaataccgagggttcatacaagcgcgtaacctcttgtattactcccgctctacttgcgaattttccagctccaacggagtcttgcgaccaaaaattttaaccattactttcagtttctttttctcgttgttcacctcctcgataattccactaaatccgttaaacggaccatagtttacttttaccgtttcaccgacatgatatacaacggccggttcgtcacccacctcctgcatctcgtcgactgcgcccaacatacgattaacttccgaaggccgtaaaggctccggctgattggattttccacccaaaaagtcaatcacattcgttgtattacgcaaatgatgaacaacctcacctactaaaatggcttcgacaaaaacataacccgagtaaagatttttctcctttaccacctttttcccgttacgtacggtgtaaactttttcggtaggtatcaagacctgaaatacataattgccaagatcggtattcttgatttctgcatcaagaacttctttgaccttgttctcttttccgcttatggcacgcaaaacgtaccagccttttttttcttcagacattgatttacctccctaattaaagacctccgtaaataaggtgcatgattttgtcaatacattgatccattgcaaatatgactatagcgataataagggaagcaaacataaccaccacagcactatttgccagctccgacttggtaggccaagaaaccttatgtaccaattcgttataagaatcttggatatcggcaagtattttcaatttcttcattgtttcactaaattttgcacgggtcgagagactcgaactcccgacacctggttttggagaccagtgctctaccaactgagctagacccgtataaaatcagccccacaaagaggctgattttgtagttttatcaaaactaaccctttatagaattagtccaaaatatctgtgatctgaccagaacctaccgtacggccaccttcacggattgcaaagcgcaaacctttgtcgcaagcaaccgggttgataagtttcacattgatagtaacgtggtcacccggcattaccatttctacaccttcagggagagtgatttcacccgttacgtcgagcgtacgaatgtagaactgaggacggtagtggttgtggaaaggagtgtgacgaccaccttcttctttcttcaagatataaacctgagctttgaattcagagtgaggtttaacctgtcccgggtggcagataaccataccacgtttgatttcattcttgtcgataccacggagcaacaaaccaacgttatcaccagcttcgccttcgtcaagaatcttacggaacatttcaacaccggttacaaccgatttcttgtctgctcccaaaccgaggatttgaacttcatcacccacttttacgcgacctgcttcgatacgaccagtagcaacagtaccacgacccgtaatagagaagacgtcttcaacaggcatcaagaaaggtttatcaacatcgcgcggaggcagaggaatccaattatcgacagcatccatcaactccatcactttctcttcccattgagcttcgccattcaatgcgcccaatgcagatccgcgaataataggagtattgtcaccgtcatattcatatgctgaaagcaattctctcatttccatttcaacgagttcgagcatctcttcatcgtcaaccatatcgcatttgttcaagaacacaacgatacgaggaacgttcacctggcgagccaacaagatatgctcacgagtctgaggcataggaccatcggtagctgcaactacgataatagcaccgtccatctgcgcagcaccagttaccatgttcttcacatagtcggcgtgacccggacagtccacgtgtgcgtagtgacgatttgcagtttcatattctacgtgagaggtattgatggtaataccacgttctttttcttcaggagcgttatcgatagaatcgaaagaacgcaattctgaaagacctttttttgcaagaaccgtagtgatagcggcggtcaaggtcgttttaccgtggtctacgtgaccgatagtaccaatatttacgtgtggtttggtacgttgaaactgttcttttgccatagctttgtattattttataaatgattagctttctaaaaacttgagccgatgacgggacttgaacccgtgacctcttccttaccaaggaagtgctctaccgctgagctacattggcatttattcttggagcggaagacgaggctcaaactcgcgaccctcagcttggaaggctgatgctctatcaactgagctacttccgcatttttttgtgggcaaagatggattcgaaccaccgaaggcgtaagccagcagatttacagtctgccccatttggccactctggtatttgcccttatattagcctttacaagaccttaaatttacatctcacccccctctaccacacacatctttccttttcagaagaatgcacccgtttatcaaagattgagtcggtgagaaacgggtgcaaatttaggcattaattttaaattacaaaaatatcagtacattttttttacttttcacgcatcttttctttggttttcagaagctgcttaacgagagcctcgacagccatatcgaccgcctcttcaaaggtatcggcaaccttgcaggaaaacatatcctcatttctcggaacaagaaccttaattccagcctctttgttctgtgccgtttccggttttaccactttcaaagaaacttcgacggctataatcccatcgtaatattgttctaatttagaaacttttttctgaataaacttttccaacttttctgatgcatcgaaatgaatcgcttgaatacggatttccatatttcctccttttttatgactttcttttcgggaaagcctggttataactttgttttagttcttcaaacgttatatgtgtatatacctcggttgaagctaatgaatgatgtccgagcagttccttgacactattgagagttgccccgttattcagcatggccgacgcgaatgtatgacgcaatacatgcggacttcttttatcgagcgaacaaactttcgacaaagacccattgactacccgataaactaactgcggatataacggttccccattttcccgaacgaaaaagaagccacaatcatctccacacgactctttacgagcctgccgataaccggcaatcatctgcgacaattcctctccgtacggaatcagcctctgtttattcctttttcccgtcacctttatctctccttcacgcacatcggtatccctcaaccctatcaattcggctcggcgcatacccgtatgataaagcatagcgataataagtttgttacggaccgcctcgaaaccttcgccatacgacacatcgtccaaaagctcattcatggagtcctgccgaagataaaccggcattttcttatgtaccttaggcaaaggaatatttttcacagggctttcctgaatatccgattgcaccacaagatagcggtaaaaagccctcaaagaagaaatcttacggcaaatactacgagccgacattcctccttccgacaaaagagccacccattcacgaatacaatcggaggttaccttttgcatctcaataccatcacactcggtttcaaggaactttttaaactgaaacaaatcgtttctatatgacaatacggtatgagtagaaagattcttctcataccggatatattctaaaaacgattcgatcggcatattctcgtagcttttaacttacgctacgaatataaaggaaattcttgaaaaatccaatatttgccaacaacaaaaaaattaatcttctatctgttgaagtttctgaatgtagatagcacgcatcatttttttgcggttcgtaacagatggtttttcaaatgcctgacggttacgcaattccttaactacacctgttttttcaaatttccgtttgaattttttcaaagccttctcgatgttttcgccttcttttactggaactataatcataattatttagaaattagtttatttgtttcttttgaataaattgcggtgcaaaattatagattgttttgtgattaacaaaactttcgaccgctaaaatatactcgaaaataaattttacacaaaatcggcacgattatatccatctttctattccaatattttcacagccttttatcttcttattttactaaatatcgttacctttacacacggttgataaatatttatcgacaataactctaaacattcagattatgagtaaatcgacattaccccgactcaaagccctgcgtgacgaaatgggcaaagccggtattacagctttcatcataccgggaaccgacccgcatcaaagcgaatactatgccagccattgggcggcacgaacttggatttccggattcgacggatcggctggaactgcggtcgtcacaaccaatcaagccggattatggaccgactcgcggtactttctccaagctgctcaacaactggaagattccgggttcgaactttttaaagaaggactgcccgacactcccaccatcgagcaatggctgctgaccactctaccgcaaggtgcgaccatcgccatcgacggcacattgttcggggcatcgaaagccgctgcgatgaaacaaaacttcgagagccacggcttccgattcgtatccgatttcactccgttcgactccatttgggaaaaacgcccatcgatccccaaaaacgaagcctttattcacgatgaaaagtacagcggagaatctatctcggataaaatggcccgaattatggagcaagtacgccaagcaggagccgctgctctgttattggcagcattggacgaaattgcttgggcatttaacatacggggaaccgacgtagaatgcaacccggtcgtcatttgctatgcatacatagacgactcccggcgtattctttttatcgacaaagccaaaatcaacgatacggtctgccaatacctgcaaaaaaatagcgtagaaataatgccctatgaaaacattttcgacttcgtagcagctctaccggcagagaaaaaagtattcgtagacaccaacaaaatcaattacaccttattaaataagctgcatgccatacccgtatcgggccaatcgcctatcgctctactgaaaagcatcaaaaacgagactcagctcgccgggacacgcgaggcaatgatacgcgacggtgtagcattggttagattcttccgttggttagaaaaaaatatcgacagcggcaaagtaaccgaaataacagttgccgagaaactgcgagagttccgctcgcaacaaagtctttatgtaggagaaagtttcgccactatcgccggattcaacgagcatggggccattgtccattactcggctacacccgaaagcaatgcgatcatttctcgcaagggatttctgctcatcgactcaggggcgcaatatctcgacggaactaccgacatcactcgcaccgtatcgttaggcaatctgtctcctcgccaaaaacgagacttcacactggtaatgaaagggcacatcgctctcgccacctgccattatccacaaggtacgcgcggagcccaactcgatgccctcgcccgccatttcctatgggacgatcacctcaactacttgcacgggactggtcacggagtcgggcatttcctcaatgtccacgagggaccgcaaaacatacgcctcgaagaaaatcccacgcctctcatgccgggcatgattacctctaacgaaccgggattataccgtaccggcgaatatggcatacgttgtgaaaatttagtcttgacagtgcccgattacgaaaatgaattcggcatgttttaccggttcgagactcttacccttttccccttcgataccgaggctctcgatatttctatcatgaccgagaaagaaatcgagtggctcaacagctatcacgaaatggtctatgaccgattaagtccgatgctcgacgaggaagaacaacaatggttacaccgcaaaacaacagcaatttaattcaagataaaattataaactaatcatggcacttataaaatcagtacggggatttaccccgaaagtcggtaaagactgtttcctcgccgataatgcagtactcatcggcgataccgttatcggcgacgaatgtagtatctggttcggagccatcttgcgaggcgatgtcaattctattcgtatcggcaaccgggttaacattcaagacggatcggtattacataccctatacgaaaaatccaccatcgaaatcggcgatgacgtatccatcggacacaacgttaccatacacggagctaccatacacgacggagccctcgtaggcatgggctcggtaattctcgaccatgctgtcgtaggcgaaggagccatcgttgccgccggatcggttgtgttgagcaagacagtcatcaaaccgggtgagctttggggcggaacaccggccaaattcatcaaaatggtggaccccgaacaatcgaaagagatcaatcaaaaaatcgccaaaaactacctgatgtattccaagtggtacgaggaagaatagtctttccgtaatcatcgtgcaaagggactgccgattagcagtccctttgtcttttgataacacggtacaatgatcgaaataacctatggttataaccgataaccacaaagaaatcccatattcgaaatgaaatctctacctttgcgtccgaaaagggaaacgacacccggaatgaacatatatcgcattccgcattaactgtgtcaaacggcaaattttccccgactcgattataaaaaacaatttaattcattttgatatgttcagcgaaaaacaaggaaatgtcctccacggtattctgttgattgtacttttttcattctccgccttttacattgcagaattccaatttataaaaaatctgtcactcagccccctcatcgtaggtatcatactgggtatgctctacgccaacagcctgcgtaaccgattgcccgagacatgggttccgggcataaaattctgctcgaaacaagtacttcgtgccggtatcgtcctctacggcttccggctgaccttccaaagcgttatcgccataggagcctcggccatactcatcgacgtgattatcgtcacctgcaccattctattgggtatcttggtggggaaactgttgaatatggacaatgacctcgccctgctcactgccacaggtagcgccatctgtggagccgctgctgttttgggtgcagaaccggtagtaaaaagcgaaccccataaaacagcagttgctgtctcgacggttgtcattttcggcacgctctcgatgttcatttatcccattctttaccgagccggagtattcgacctcacacccgagcaaatgggactctacacaggctctaccttacacgaagtagcccacgtggtaggggcgggtaacgcgatggggaaagagatttccgactcggcaatcatcgtaaaaatgattcgagtcatgctccttgccccggttttactcatcatgagttttgccttagcccgtcgagccgtaaaagcagtcaaaggagacaaaaatacaaccgccactcaacgaggaaaaatcaccattccctggttcgcattcggtttccttgccgttatcggattcaattcgttcgattggcttcccgttccagtagtagacggaatcaatagcctagacacctttatgctcacaatggccatgacagctttgggagccgaaaccaatttcgaaaaattcaaacaagcaggagccaaaccatttcttttagcggccatattgtatatatggctgttgggaggaggttatctgctcgtcaaatggttagcataaatcataatcatttcaaacgacaacgggctgaatcgtaaatttgctctctcgccctgcgggtattccccgtatctcatctatgacgagcaaaaagagaggagccccgactctgtcaactccactgccggtattttttaacccctccgtctctacgtgccacctcccctatattttgcgttgcaaaacacagaggaggaggttaacaccgatagtgtcatactaaacccaattcaatagaaaattcgagggagtagatttgaattttaacgatgaatcttttatcgaatacttcgttcctgttctctttggagagaggttaaaaaagatttcataagattttcgattgagggtttaacccctttgcccggcgggcattccccctattcacttcgcagcacaagggagaaggagaataccctcaaagttccaaagagataaaaggctgttcaaagcgacactttcaatcccctccccctactctcacaacatcataggacatttcacattccacctttattttttttgaaaagtgagaatatcgatatttagaacaacaaatgattacatatcgctttggagtgggaatctgaaactcctcccctgtgttttgcaacgcaaaatataggggaggtggcacgtagtgacggaggggttgaaaacgacatctcatcagtcggtttatatcggacatatcccttctcccctaccgtcttccggagcattgcggggtgctgcgtaagcagtatagtgaagataccggagaaacaaccatttcgaggagtggggttataaaaaagatacatctacgattcagcccattgtcatttaacatctcctcaaaaaaacattctcaactacttaattttctttttcacattaccagaagaggattttcccggaaccaacttggttcgggttctattcttactcttttcctcgccttccttcacgacttttttcggagcataagtcttcggctttcttccttgatgcgaagcctcatcggacttcttcaccatcgaatttttggaacgacgattcggacgaagttcctcctgtccactggcaaatctctctcgtcttcctcgttgcgtcttttcaaccttgggattttcagctcccgatagtttttctttacgagaagaaccgtaacggcgcaatttatactctcgctgttccatagggataaaatgcaacggttccccgtctattttcactttatcgccttcggccacccgactacccaacgtagccaactcgccgttgatagtcacccgctcgtcggcgatcattttatcggcttcccgacgggaacaaaatcccgaatcactaatgtacttattgacccgaatatccgatcgtatcactttctttgccataatcaaaactctatattttatcccaacactatatgctcagcctctaccggctcattcaaaaacagggtcgctgcctcggaaaactttcgaggcgattccgtcgtcagatagcggcaacctccccctttcgagcaacgactctctatctcaggatgccgtttcaagtaatcgtccaacctgtcggtcaccaaaggaccttgcaagactaccgaaatagacggaggaagataggccctaattttgtcgagtaacaacggataatgggtacaccccaatactatcgtatcgatttcatcggactgcgacaaaagttcgtcgatatatttcttaacaaaataatcggctcccctcccttgtgcttcgttgttctccaccaacggaacccacatgggacatgactgtccgtataccacgaattcgggatacatcttctttatctccaactcataggagcccgactgtatcgtacccggtgtagccaaaatcccgatatgccccgtacgcgacagttcggaaagcgactcgaccgtcggacgaataacccccaaaacccgtttatcgggagcgagacgaggcaaatctttttgctggatactacgaagtgcctttgccgaagccgtattgcaagccaaaataaccaaagagcatccctcgtcgaaaagatgaaatacagcctgcttagtaaattcatatacgatctcgaacgacctcgtaccataaggagcccgcgcattatcccccaaatagagataatcatatcgaggcaggcctttacgcacctgttcgagaatagtaagacctccgtatcccgaatcgaaaattccgatggaacctacattcgtaggtatttttgtcgcatccattattagaagtataaatatggaaaaaggatgataacgttcttatcatccttttcgcaacccctcgacgagggaataattatttcaatcccaatttcgctttcaccaacggagtcacatcttcactgggtgctccctgataaataacgataggataagccaaatcaaaaatataagtaaatttaccctctgcccctaccgacttaatggcatccatcaacttctgttgaataggagcgaaaagagcttcttgttgtttttgaatatcctgagacgccatttcccggaaactctcgatacgagattgggaatcttgaacctcctgcatacgacgagcacgtatcgtctcgggaatcgtatcgcccaatgccatatactctttatacttcttcgtgaactcttcttgaatttttacaaactcatcttcatatttcttattaatatcttgaagagtttgctcggcggttgccttctctggcatcaacataaaaatctcctgagagttaacggtaccgaatttaagggcttgttgcgcttgtgatacaaaactcaaagagcaaatgcacactgcggcgaaaagaaatttcttaatcatactataatttttttgtttctatactgtaagttatgaataatggcacaaaagtaagcatttattttgaatatcctaactttgtgagcacttcattactaatatctatcttcggcgacgcaaaaataatattcggagaagaagctctatcgataaccatcatgtagcctttatcttccgaaatcttcttaatggcattataaatatcgtcttgaataggcttcataagactttcgcgctttttgaacaactcgccctcagggccgaaatacttacggcgcaattcaacgacttccgtctccttatcacggatttcctcttctcgttttaccttcatttcctcggtaagaaataccaaatccgattgatagtttttatacattgttttagcttcggccgccttgtcgtcacactctttttgccaacgttgagacacttggttcaactgttcgttggccatttcgtacgaaggaatatttttgagtatatattccatatcgaccaaagcatacttctgagctaccgacgacgcagtaaaagctagtaccgccatcgcaaaaagaactattcttttcatatcgttattctatttaattaaacattcccgtttcaataaaccatataacataaaacactttctaaaaaataaagatagcgcgattctaccaaatcgcgctatccttttagagcatttaacacaaacgtatctgttttttcacaaattaaaattcctgacctaagataaagtggaaatggccaccccctttctctccttgtactttatcgaaaccataagcccaatcgatacccatcaatccgatcatcggcaagaagatacgaacgcccactccggccgaacgtttcagagagaaaggattgaagttttcgagcgatgtccacgcattaccgccctcgacaaaagctaaaccatatatcgtagacgaaggctgcaacaagaacgggaagtgcaactccatcgagaaccgggtataagcccgaccgtcggaatagggcgtaagagcaccgttatcatagcccctcaacccgattgtttccgtagcatatgtataagacccggtcataccgtcgccacccacatggaatgtttcgaaaggcgtttgcttatacttgttatacgaccccaacaatccgaaatcggcacgtcccataagcacaagtgtatatttttcggagttattcaacggggtatatacacggctcttgaattttattttataatattctatccagcgatataactcttctcggtcggctctcgacgaactttcatagaggctcttgtaatctttcttagagaataatgaataaggaggagtaaattgagccgataacgtaaattgagaacctcgacgtgtataaatgggattatctatcgaacttctacccagcgtcaatcccaacgtaaaactgtgagaagtaccgttctgcatatagtacagatactcccaatttttaagaatatatgcctgatagcccaattctgccataaaagtaaaatagtcatcgggccactccaaacgtttcccgaatccgaaggaaaccccgatcatctgcaaagacttgttcgggtctaaggcattttcataagcattttgataataatcgtcataataagagttacccaagtagctgtttccccagtaacctccatacaaagaattattgtataaactgttgtagcttcggctcaaaaaagaactttcgataccggtctgacggctataataagccgagaactggaacgagttcggacgttttcctccgaaccacggatcataaaacgaaatactatactgctgataataacgtgcattcgtttgcgcactgatcgtaaacgtttgcccgtcgccctgcggaatgatacctttaaacgatttagggttgagcaaattcttgatggagaaattcgtaaacttcaaactaagttttccgataacacccgtctgcccccaaccggccgaaaattcgatttggtcgttggctttcgattcgagattataaaccaaatcgacagtaccgttttcttcgttcggttccggttttatatccattgtctcaggatcgaaatgcccagtttgagctatttcacgagcagaacgcatcaagtccgatttactgaacaactctcccggtttcgtacgcaactcccgacgtataacatgctcatacaaacggtcgttaccattgatgacaaccttgttgatacgggcctgcggaccttcgaacaaacgaatctccaaatcgatggagtcgttcagcacattgccctcgataggaaccaactggaagaaaaggtatcctctgtccatatataaattggcaaccgcatcttcatcttccattgttcgcttgttcagcattttctgattataaacatcgcccggcttcatacccaatacagccgaaagataatccgacggataaatcgtattgcctacccagtctatatttcggatataatatttctttccttcatcgattgtcaggtaaacatctaccgttttatcgttataccgcaccacactgtcgtttacgatagcggcatccctgtatcccaactcgttatatttctcgataatcagatttttatcgttcttataattctcttcgacaaactttttcgttcggaacaaatgaagcaaattacccttttcattggtttttttcatagcccattttattttcctatccgacaaaacctcgttcccgtctatatatatcttatggaccttaactttctctttcttatccacataaatatcgacgatcacctcgttctcatgggtcaggtcatcggtctgttttatgttcacctctgcattcttaaaacccttttcctcgaaatgttttttgataatcgtcgtggcacgatccactatattgggagttatctggtttcccttgaccaaccccaagcgcatttccaaatcttcccgctcacttttcttaatcccgtggtaatttatttccgaaatacgcggttgttgttttaattgtatttcgagccatgccttattgccataggccttcgtccacttaatcacgacatcggaaaacaaaccttgcctccaaaattttttggctgcctcggtaatggcattaccgggtatttcgataacctgtcctacttccaacccagagtaacctatcaatacataatcctcataattgggagccccggtaaccgtgataccggcaatctcatatttctgcggaatggccgaataaacgaccttcggattatatatcgtatcgagtttctcttcattctgtgcggtcacaacttgcacacaaaaagacaaaaacaaaaaaacagccaaacttttcaaaggcatataatatcgcattttcaatctctttttcttcatttatagttgttcgctcgtttttccgaaacgacgttctctggcttgatattcgacaatggctctataaaggctttcgccggtaaaatcgggccagtattcttctgtaaaataaaattcggcatacgagagttgccacaacaaaaagttactgagtcgtatttctcctcccgtcctaattaacaaatcgggattaggcatattcacagttgtcataaactcatcgactgtcgtttccgtaatgtcgtccaccgacaatctacccttttgaacctcctgtgcgatacaccgggccgcgcgagcgatttcccatcgggaagaatagctcaacgccaagttcaaaacaatacgctcacctcccgacgtatcacgaatacatttcaataaccgtgctttcacatcagatggcaagcggtccaaatcgccgataaccgacaaacggactcccttctctaccattccgggagtttcccgctctatgccaaaaacgaccaaagccataagagcatcgacttccgcttgcggacgattccaattttccgtcgaaaaagcatataaagtaaggtattgcacccctacttcggctgctgcatccgttatctcatgaacgacatcaagacctttgcgatgtccctccgaacgatccagccctcgctccttagcccaacgcccgttgccgtccataataatggcaatgtgtttgggcacacgagttagatttatctgctctacgtaagtcattcctctttcaacgattatcgttgttacaaatttcttttttacggccgaattcatacgtgattgaaaacaaagtcgtcgaaaaccaatccgtatttttcagcacactgctttctatatggtaaggatctgcgagtgcctttccgtcgaaactgtctcccaacgttttgtgcatggcaaactccaaacttatattccatctcggagctattttatatttaaccccggctcccaaagaagcatcgaaactcacataaccgcctccgacagtcgaatatcctactcccacccccgccaacaaatatggagaaagccgtttcgttcccagataagaatatcccattccataattaaagaaattgaattctatctgtcctcccaaccgatattgccaactctcaaacgagtaatcacttccgtttgggaaacgattgtcaaaatcacgggtatcgcctgaaaactgcatggctgaaatatcggtctttacagcccaccgataattcaacaaaaaacggaacactccgcttatcgcagcacccggccgatgccacggcgaaacctgattggcatcgcccatataacaacttattccacccgctatccccgcatcataacggaaatcctgtgcagataaaacagctgtactactcattattatcactataatcggaattatttttttcatgcgtgtgccatttttacgagcctacatacataaaacgaaataaaccgatgaaaagtatcttttttcttcaaaacacactcattatggtatcggcggatatctcaacctaccgattgctcctcgccatatttcattataaatatcaccggagttattttcccctccgaatatataaatataaggaatctggtaatcgctcgtacgagcaaccgacatagccggaaccctccgaataggcataaacttccacaacgaagccgcgctccgagaggtaaagtccgcatcgacaaccatcaccgaagcaaaagcccgcggattgatataggtaggcatagccaacgactgaggagccttgctccatgtattgccgttatttaccgaaacatataccgaatcggctaccccggcagcctcgcgtcccccgatcacaatccacgatgtgtattgcgtcgttatccagtactcactggtcgtaaaagtaaaatacgggaacagaatggctccctcgcaaggttttatcgagccttgtaattgagcccaagcctcaccgtcatatccccatgtcgcaccggtcagattatcgtcggccattcgtccgcccaccataatggactggggagaatccaaatcatactccgacacgaatgtcaccatagggctactgcccgtaatggggaaattagcagctgtcggataaggtacaaatccagcaggacgaggatagcaatcgtgtttataaacaccgttctccgacacgacacccaacagcctcgacttccacgttcctaccaacgaataaaacgtttgcccggtcgaagtccactctacaccattttccgaccgatatagctcaccggtttgcgaaagcatatacaaagcctcatcggtagcttgtaaagatttcaaatcaggtgtaaacgataacgacaaaggctgcggtgtccagtcatcggcataaggatcttccgccgtatataatgtacaagtcgaattagagactatgaaagattgaactttccctttataataaacggctttttgcgcatcgaccgttgcttgactgccacacggtaaaggccgaacgccgaacatggtattccaatacaatgagtcggggtcgatttgatggacatttaccttaacggaataccacttcacggtcgtaccgttttgagccgtcacctccaacgaaactttcgacgtaaaatcgatagaatcggtaggattggctatatagtctatcgtatcgttcttggcaggatcgcctttgtccatataaatcttagcctgtgcgacgttatcgaacgagatattcgcaatcaatgcggaaacatcggttccgacaggtaaagaatcggcattataaatctggcctttattcaagtctatcgtaaaaaatatcgtatctaaatgagctaacaccgagtcattggccgccaaagaaaaaccggaaacccgtacgctctccgatacagtatacgatataacatcatcttcggtcgaattacacgaaatgccggataaaaataaagccgctatacacagaaaaaaatatattttttgcttcttcattaactgatatgagttacaggtttgcagttacaatcggcaaatttagcaacatttttttctttgtacactacaaacaccgataattataattatttatggataaaccgattcatatacatcgatttcccagttcaaaaataaataaaaaaagagagagccgtttcattttagacgaaccgaataattgacacggcaaataatctgtttttacctattttcataccagtctatttttgcttcgccacaatattcagagcgcacaagcataccctttacgactggcgcgacaattccatttcccagaaacatcggcccggtttctactctcgtttcgtcccaatatcccgaatctaaaaatgactgtaacaatacagctcccccttctaccaaaagatgttgtatgcgtcgacggtatagttcgttcaacaaaccgggtattaaatctttcccgaaagggaggcgaataacttcgacagaatcgggtaaaaccggataaacaatatccttcgccgtaataacaagcgaaggcaatccatctgtaaacacgtgcgaaccagacggaacgcgggcatgttcgtcgagaacgattcgcaaaggtgaacgcccgtaccacaaacgggtagtcagcgacggattatcggcaactgccgtgttcgtccccaccaatatggcatctgcttcggcccgcaaacgatgtacccacacagacgaaacatcgtccgaaatccgaatggcaggttcccccggtttccgaatccggtcgatataaccgtcccgactctgcgcccacttcaaagtgacgaaaggacgctcatcgatttggcaggtcataaaagttcggttcaaagccttacattcttcttccaataccccagtgacaacttctacaccggcctcccgcaaccgggcgacaccttgccccgacaccttcgggaacggatcgaggcagccgacaacgaccctcggtatcttcttttggacaatcaagtcggcacaaggaggagttttcccgtaatgagaacaaggctccaaagaaacatacaatgtacattccggcaacagtcctgcatcccgcaccgaatttatggcattcacctcggcatgcggttgaccgtaacaccgatgatacccctctcctataatttgcccccgatgtacgacgaccgcacccaccatcggattgggtgacacgtgtcctcgacccagagaagccaactgcaaacaacgtcgcatgaaaacggcatccatatctgttttatccatattccgattttttaattaaagcccgatttgatcggtgtagtttttctgcacgaaatatctattcccaaaaatcaaaacagtttcttaactttgcatggatttacaaatatcgacctacccatgcaacaaagtatcgatctgttacggcgcaaactgggagaaatctatcctcccggggaaatcatcggattcacccgaatgattttcgaaaccctgtgcggctatacccccaccgatattctgctgcacaaagatacgattttatccgaggatatacaccgtaaaatcgaacgtataaccgacaggctctcgcagcaagaacccattcaatacattttgggatataccgatttttgcgggcgacgtttcgatattgcccccggagctctcattccccgccccgaaacagaagaattgacaagactcgttataacggaaaactccggtcaaccttcgcgcatagccgatttgggaaccggaagcggttgtattgccgttactcttgcgctctcgttgcccgacagcaagatcgaggcatgggacatctcgacagaggctttggaaattgcacagtgtaacgcccgaaaacacaatgcccatgtaaacttctttcaacgggatattctccgttacgatgtatcagaactaccagaggaatcattagacatcatcgtcagtaacccgccctatatccgccgatgcgagagccggtccatgagtgccaatgtgctggaatacgaacctcatatagccctgttcgtcccgaacgaaagtcctcttctgttctatgaaaaaatagctatggacagtgttcggcttttatcccccggaggcaagctctacttcgaaatcaacgagacacaaggcgaagcatgtgcccgcatgttggaaacagcgggatacaagcacatcagagtcatcaaagacctgtatgagaaaaatcgattcgtttctgctataaaacccatacgacatggctaaaacactaactccgcccgaagccctccaccgagcggccgccctctgctcttcatcggaacactgtatagccgacatacgggaaaagctctcccgatggggtatcggagaaccggatgcccgaacaatcgtcgaacgactcgtgcaagaaagattcatcgatgaagaaagatacgccattgctttcgccaaagacaaattccgtttttccgggtggggacgaataaaaatccgctatgccctgcaacagaaacgaatcgggaatagtgacatcgtcaatgccttatctctcatcgatgaggaagcatacacgacccgtctcgtcgacctgctcgaaaagaaatctcgttcgattcacgacgaagatgtcgagattcgacgctccaaattacttcgtttcgccgcatcccgagggttcgaaaccgaattagtttttcacatccttaaaggaatcgaatcatgaaaacgcccccgttcctcaaagatttcatcgatttgttctttccccggctctgcccggtctgccaacgggcgttgaacagaaatgaagaaaacatttgcaccacctgtttgcatcgattaccgcgcaccggttatcacctcgacccgctcagcccgatggcacaactttttctcgggaaagttcccattgaaaaatgtgcggcatttttctttttctccacgccgagcgatgcccggcaactcatacaccacatcaaataccacggaggaaaacaatgcggtttcaccttagggaaaatttacgcgaacgaactgctgcacagcggatttttcgacgacataaacgcgttggttcccgtccccttgcatccggcgaaattacgccgcagaggatacaatcaaagcgaatggattgctcggggaatcgaacaagtcaccggaatcgaagtctgcacagaatggttataccactcccaaaacactaaatcgcaaaccggaaaaaatatctacgaacgctggctggacacccgcaccgcttacgaaacggactcagaactcgatttatccgacaagcatatcctgttagtcgacgacgttgtaaccacaggcgcgactcttctggcttgcgcacaggcgctctatcttcacgggaagccccgaatcagctgtctcacactcgctgcggtactataagaagctgttttaaatttattccgagacagattgagacctatgttgaagcagattggagtccgaaataggcagtcaatagcgggctattgacaaaaatcaagggattcaaaatgccagacaggggccaatatggccggaacatacctgcttgcaatgataatattatttctctataaatttaaaatagcgtctaaatattttcatatttttcacctgccattcgaccgtttatctgctatttttcttacctttgtgttttaaatattctaaacattattcgtcatgaaaacggtagaacgattacttgctgaaaaactattaaaaatcagtgctatcaaactacaacccgaaaatcctttcgtttgggcatcgggctggaactcgcccatatataccgacaatcgcagaacactctcctaccccgaagtcaggacgtttattaaagtagagctctgccgggtaattatggaaaacttcggcgaagtagatgccattgcaggtgtagccaccggagcaatcgcacaaggggcgcttgtcgccgaaaccttaggattaccttatgtttatgtacgctccgcaccgaaagaccacggtttggaaaacctcatcgaagggaatttaaaacccggtcaaaaagtggttgtcatcgaagacctcatctctaccggaggcagtagcttaaaagcagtcgaagccatacgaaacgcaggctgcgaagtaatcggtatggccgccatcttcacctatggattccccgtagcagcccgcaaattcaaatcggcacaagtcgaattgattacattgagcaactataatgcaatgctcgaaaccgcattggaaaccaactatatcaaacccgaagaccttgaaacattgcaggaatggcgtaaagacccggcaagctggcaaggtcccaataacaacacgccttcggtatgacaagtttcgaaagtaaaacggtacgaatagcccactcctccgagcgggtctttgaattgctttccgacctctccaacctcgaaaggttcaaaggagccttgaatgctcccggaaacgaaaagctgaaaattacaggttacgacaaggacagcctctctatcgaagtgagccccataggatctatcactttcagaatcatagatcgggaacccaataaaacgataaagttcgaagccgaaaactccccgcttcctctcaatctgtggatacagttggtctcaaccggagaaaatgaaacggcatcgcgtatcacggtcaaagcggaacttaaccctttcatcaaaccgatggtctccaagccattgcaggaaggggttgataaaatggccgatatgcttgtcatattgccctacgaataaaaagttattttaatcttttcatctgacaacaaaaacgtacctcgaatggcgcaaaaactttgggaaaaatcggtgcaagtcgatcgggacgtcgaacggttcacagtcgggaaagaccgggaaatggatttatatttggctcctttcgatatactgggatcgctggctcatatctccatgttgcaatccatcgggttgcttaccgccgaggaactgaaacaactcactgaagagttacggaacatctatcgagataccgaaaccggtaaattcttaatcgaagaaggtgtcgaagacgtgcactcgcaagtcgaactcttattaacccgcaaattgggcgacatcggaaaaaaaatccatagcggacgctcccgtaacgatcaagtattggtcgacctcaaactcttcacccgttctcgcttacagaatatcgtaaaaaagacagagaaactattcgataccctcatcgcccaaagcgagaaatacaaacaagtactcatgccggggtacacccatttgcaagtcgctatgccctcctctttcggactatggttcgccgcctatgccgaaagtctggcagacgacctcatcgtcatgcaagccgcctaccgggtgtgcaaccgcaatccgttagggtcggccgcaggatacggctcttcattccctctgaatcgtacgcaaaccaccgatagcctcgggttcgaaacgatggattacaacgtcgtgtacgctcaaatgggacgagggaaaaccgagcgtatcgtagcctccgctatcgcatctattgccgcgactctcgctaaactggcattcgacgcctgtttgtacaattcgcaaaacttcgccttcattaaattgcccgatgccttcacgaccggttcgagcatcatgccccataagaaaaaccccgatgtttttgaattgacacgagccaaatgcaacaaattacaagcattaccctatcaaatcacactcatcgccaataacttgccatcgggttatttcagagacctacaagtcattaaagaactgttcctaccctcgttcgacgaattggaagagtgcttggacatggtcgacctcatgatttctcaaattgccgtcaatgagcatattctcgacgacaaacgatatgattatatgttcagcgtggaagaagtaaaccggcgagtgcaaacaggcacacctttccgagatgcctataaacaagtgggattagaaatcgaagccgggaaattctcccccgacaagcatatccatcatacccacgaaggcagcatcggtaatctgtgtaacgaccgaatcacagaactcatgcgaaaaacgatcgactctttcgacttcgctcgtaccgaagcggccgaagctcgactcttgggtcgctaataaattattttagacagacatttcatagctgtaaatcgaactccttctaaacatacgacaattatggaatataaacctcaaccggaccgctataccaacggaatgctttatcgccgatgtggtgacagcggcatacaactacccgtcatatccctcggattttggcacaacttcgggaacaccgactgttatgccaccggattggaattggtcgaatatgcattcgaccacggagtatgccacttcgatttagccaacaactacggccccccggcaggcagtgccgaagaaaacttcggacgcatgatgaaacaaagtttcgccgcacatcgcgacgaaatgttcattacgtcgaaagccgggcacgaaatgtggcccggcccttacggaggatgcagctcccgcaaaaatctcatggcaagtatcgaccaaagcctgaaaagaatgaacctcgactatgtcgatctcttttacagccaccgatacgacggaattacccccatcgatgaaaccatgcaagccctcgtcgatatcgtccggcaaggcaaagccttatatataggactatccaaatatccggtcgacaagctattgtatgctttgaactacttgcacgatgccggcgttccgtgtttggcctatcaagatcgctacaacatgttcgaccgtcacatagaaaaagaacacctgcaaatttgtatggaaaaaggcatcggggtagtggcattctccccgttggcacaaggcatactcagttccaaatatctgaacggcataccggccgattcacgagcagcccgtcccgaaggttacttgaaacaatccgatgtcactccggataaaatcgctaaggtagcccgccttcggccaatcgcagaacaaagaggacaaagcatatcgcaattggcgatcgcttggatactacgccgcaaagaaatcggtagtgtaattatcggagcccgcaacctcgaccagttgaaagacagtttgcatgcagtggataatttgtccctctcaccgtccgaaatagaactcatagaaaacatattgaaatgaagcgaacaggcaacattctcattctcctccttatcataatcatagccacaagctgcgacggaggcgaccgcgaccgtatcccggctgccgccgtccgggtagaatttgccaaccaagccatgtgggacttatatggagtaagcggtagtttcatacaccgccggttcattcgtaaccagaaaattccggcgggatttccctataccgacctttcggccacaggatacggagggctcatgcttattactaacgaacacggtgtgccctacgtctacgacctctgttgtcccgtagaaatcaactccaacataagaatcgaattcgacgagaacaatctttgtctaagatgccccaaatgcggttccacctacgacatcaccacaggaggccccatgacagggacagcaaaagacggtcgttatttcttgcaaagttacaatatagcaccctatggctcagccggaggccaattaatataccgttaacaataaagactcctgaaacaacaataaaatccaaagatgatttaatatgtattttgaggagttcattagataaacaagattagatggttaataatcgcaatatactaaataatttcttaatataagaaaaactaatataatagtaaagccatgaaagaattaattaagaaaatacttagtgagaaagatgcaaaagaaggtcttcatgtgagaatgatcgcagaaagaatattaatgagtggagcttccggtgatatgtcaattgacgaagttctaaggaaagttactcaaatattaaatagagaagttaaaaagaaaaacgctgctgataaagattttgcaagagtaaaaaatccaaagaccggtaaatttagagctggtgtatataagttgaggataaaaaagaaagaacctctccccattcctattattgatgagaaacaaaataaggatgtcattttgaaagaaacaacaacttcccaatctcaaaaaacaacgacaaactacatgggaaaagcaggagaatatgcagttatgtcagaactattatttcgtggatataatgcaaacaatatgagcgttgatgaaggcgtggatattgttgcaagtaaagacaatgtattcttctttgttcaagtaaaagccacagaattaaaagggaattatacagctcacactcaaataaaagtaaatagattcgacgcttttataaacacccaaataagatacattatagtagtgcgctgtaaggagaataatgcttacaaaaatatattctttactttctctaatagtgacattgaacaattcaaatttcacaaatgtgtaaacacgtctgacgattacatctatattaaaatacggtttgatgtggatacgcataagcctgtattatatcatgaaaataaaagtcttgatatgagtttcttcatgaatcgatttcaattataacacaacataattatgagaaatcaaatactattattttccctattattgacaataacatcttgtacagaatacctcttatattatcaaacttatacggtagaaagtgagttggaacaaaatgaaggctccctcaaatatgaaaacgaggactgcgcattgtattataatctgtgggcagaatacggaaatccgggattcgtaatggaaaacaaaaccgatagcgatttattcgtattgatggacaggtcgttctatatacacaatggtgtggcctatgattattatgccaatagggagataacggagagttatacttcgacatatgaagagagtataagtattgacgggaaagccatatatccctattattcgttttttaatccgattgatgcaacaaaaaaagttggatatggcactaatcatgtttcttctataactgtaaaagaacagccggtaatatgtattccccctcactcagcaaaatacattcctgtgcgttatccaataagcgatggaaatcgactctatcatgacggttcggtaagccccgaacaatcaccatatatattcaccaacaggatttcgtacaaatcgaacaatgaagattctatcaagcacgtagaaaatgaattttgggtgtccaatatagaacaaatcaaaccacatattggtttcccagataaatcagtaaaacgagaaaaaaaagagaatgtacttgcagatgaaaaaaaccctaacaaattttatatcaagtattatgaaaaaaatagcctcttttaggaacagaagaacacgatatttattgatatgaaaacaaggctgacatcactaatcttgttatttgcattgtgttgccctgctataacttccggcgaaccaactgacaaaaagaaaaaacaagaaactgcaactgtatatatctgcaccggtccaaaatctaaaagattccatgcccacagaaactgccgaggattgaaaaaatgtagtgcagaaatagtctctatatccttagacaaagctcaaaatagcggatataccccttgtaaaatttgctactgatatacaggttcaatcatttctacatggtataaaatcacattttataaataattcaaatcgattttcctatttttttaagaatcaaaggcaggaaatatattgtgtatataatatacattatatatctttgctacataaaaaaatagaaatgatatggatactacactgaaaagaaagaatatagacctccctgtggacactctaaaaaaattatcactcatggcggtagcacaaggaaaaagtcttaaagcatatatagaacaagtacttatttcaaaggccaacggtataaccatagaggttagtgagaatccttccccatcaggagacaagtggtttgatgatccggtaaacatggaatcagtaaatcgtggaatagaagaaatgaaagccgggaaagggactacatattctatggataaacttagggaacttttggattcatgaactatgagttgatattaatgccggaggcagagcgacatctaaaagaatggataaaatccggacaaaagaaaacactacgaaaaattgttgcactcttcgaggaactacggcaacaccctaactcaggaacaggtcaagtagaacaactcaaaggtgagctacaaggtttttggagcagacggatagacaaaggatcaaggcttgtttacaagattgacgaggatattgtaacggtatttgtgatttccatgaaagggcattatggagacaaataataatcgttctatatttgtagatgaataggcagtgaaataagttagcttgtaatccctaacataattcccctccatcggacgataaagtctcaaacaaaactttccattagattttcgagccgtaattttgcaaaaacaaaaaagcattttatctttgcactcgcaattgcgaaaatagctcagttggtagagcacaaccttgccaaggttggggtcgcgggttcgagtcccgtttttcgctctaaggctgcccgaatggtggaatggtagacacgaaggacttaaaatcctttggctattgcagctgtgggggttcaagtcccccttcgggtactgcataaggctgttaatcttacgattaacagcctttttttaacaccaaaaatgtccaccccgccaaaacggttctgtcgataattaacagggattgttcgtgtttgtcctcctcccctgccgtgtcccgtagcattacggggtttcgcatataaaatcggaacagaaaagaaaagggaatacgtcttaacctctcccccctgtgttttgcgcagcaaaatatagggggagtgcccgtagggtgagggggttaatatatacaatcaaatattgctttgcgacacaggggagaagattgaatactttttatcttactggcaaaaatcacacgacaaaagagagctgcaatactccttgtctaactcttagaacagcgaaagattagtatgacactatcggcgtgcttttttaacctcctcccctgtgttttgttctgcaaaatataggggaggtgtcacgaagggaaggaggggttaagtcccatcaattccacctatatcaagtaccccctgatacattcttctctctgttgaaaagaattgacaaacaagagctcttttcaaactttgttcaatcatgccataaaatcgtgcataccgtcacatacttttgctccaaaaacaaaggtatggaaaatctcgaaaaacaatttgaacaagaactatcggcaagtcgaatgcaaatagaactgctgcgtaatcaagtgttgttacagtattacacacaactcctcgaactcgatccccttctgcaaccccaagaggtaaaagccctgatgagctgtatcaacacgctcgaacgttacgcccgtaaatatgattccaaaaagaaacataacgatacgacacaagcctcttcggcaacacagcaatcggcacgcagcgataacgaaaacatagattccatacctgacaacgaccaaaaacaagacccttgtaatctaacgatagtcaatcctctggcaattgtcaaaaaaacctccaaccgaattccaataaaaaagtatcccggaaatcaattccgcatgcgatactcattaggggtaacacccactttctgcttgaataaacgactgaaatgttgtggatacttgaaccccaagctataagcaatttcactgaccgaaaggctggtatcgaaaatacggtctttcgctactccgatcaacttagcttgtatatactcctgtgcagaatttccggtctcttttttaatcaagtcaccaaaataattaggagacaaatgcaaggaatcggcacaatattgaaccgacggaagccctatgatttgaggtttctccgattgaaaataatcgttcaacaaattctcgaagcgagacaaaatatctttattcacattgctgcgagtaataaattgccggtcataaaaccgaacgcaataattcaagaacaattctatattatttacaatcaacgtcttgctatgcttatcgatagcatgttgcaattccgactctatattatgaaaacaatcgagaattacttttcgttcctgttccgacaaatgaagcgcctcattcgattcataagaaaagaaagtatagttcttcatctcgcgtacaagcgaagtaccccgtatcaaatcagggtggaacaaaagagcccagcccttaggctggaaatattctccattattgacaatccctacgacttgtcccggagccagaaaaacaagcgttccttcttgataatcataataattccgaccataacgaatatccccgcatttcacatctttcaaaaaaacggcataaaaaccaaaccgttgaagagaatgcaacataggcctgcatttcgaaaaatcgacaacgctgactaacgggtgcaaagtttcctgtcccatcatatcgttatattggaatatattgtcaagtttcaaaatctcgttcataatcgtttgtctttcaaaattccacaaaaaaaagaatacactctcaaaaatatttagtcatacgaaacgcagtcattctctgttttacgaaaacaaagttaatacttttccaaataggtctcatacctcaacttccgaatccgtaaaaatggtatatctatctgtaatctatatacaaagcccttacgatttcccttctaattttgtctcacgaatctaatggtaaagaaacatgaacaaaaatgtattgatactttcttcaagcccgcggcgaggcggcaactccgaccgcctatgcgatgctttcctacaaggctgtaaagatgccgggcacacggtcgaaaaaatatttctaaaagacaaacacataaactactgcacaggttgcggtatatgtagcatgtacggcaagccttgtccgcaaaaagacgatgccgccgaagtgatcgaaaaaatgattgccgccgatgtcatagtcatggcaacgcccgtctatttctatacgatgagtgcacagatgaaaaccctcatcgaccgttgttgcgcccgttacacagaaatcacaaacaaaaatttttatttcatcgtaacggccgccgaaccgagtatcccggctatggaacgcacgattgacggattccgaggatttctcgactgtctcgaaggagctcgtgaaaaagggattatctatggaaccggggtatggaaaatcggagagatagaaggaaaacccattttgaaagaagcctatgaaatcggggaaaaaatttagaagctgttttaaatttattccgagacagattgagcctatattgaagcagatcggagttcgagatatgcagtcaatagcgggctattgaaaaaaatcaagggattcaagatgcgagacaggggctcaatatggccggtacatacctgcttgcaatgataatattatttctcaataaatttaaaacagcttcttaataaacaatcaaataattatgacgaacaaaataatattaatcatgatgttgctcacatgcctatccattcccgctcagaaaaaggggatcgatgagaaaatacttgtcgtctatttctctcacagcggtaatacccgcaccgttgcagaacaaattacccgatcgaccggagccgacttgttcgaaatacaaccccaagaagcctatcccaccgactaccattcagtcgtgaatcaagctaaaaaagagataaacaacaaccatcgccctgcactgaaaaacgatgtacaagatttcgataaatacgacataatattcgtcggctcgcccaactggtggagcaccatagcgccaccggtggctacattcttggaaagacatgatttctcgggaaaaaccatcgttcctttcatgactcatggaggaggccgattcgggcattctatttccgacatgaagaaattatgccccgatgcatctttcttagaaggtttggcaatcagagacagttatgtaaacgacaattgtcaagacgtagttaaatggctgcaaacactaaaactccttaaatgattatgttatgaaacaaaaaatagttttgataataggaatatctttaagcttagcatttggtgtcgaagctgaaaacgataaaaaagatacgacgatggacagaatagaaacatgtaaacaaaattatacccgattgttcggtggtgaagctctcacagggaaaggaagtgaccccgagttgatggatatacttcaaaaattcattttcggcgaagtattcgaaaccggttctctcgaccacaaaacccgcgagatgattacgtgtgtcaccttagcctccatgcaaacactcccccagttgaaatctcatgcagcagcggcactcaacgtaggagtatctccgatagaattgcgcgaagccatctatcaatgcgccccatttatcggatttcccaaaacattgaatgccatttcgacaattaatgaagtctttcaagaaaaaggaattcctttacctttggaagcacaaggaacggtgaatgaagacaaccgatacgaaaaaggaaaagaaatacaataccctctatacggcgacgaaatagcccgaacatttagcaacttacccgacgaaatgaatgaaagtctccctcggtttctcaccgaagtaggtttcggtgatttctatacccgttctggactcgaccttaaaacaagggagctactttctctttgtgtattagcagctatcggagccgaatctcaaatacattcgcacagcaagggcaatatcaaggctggaaacgacaaagccacccaaatcgcagcgatgatacaatgccttccctacataggatttccaaatgcgttgaatgcgattcgtattatcgacgctttataatacattacaaagaaataagatttgaagaaaacgatccaatcttaattctctctgaggcctatccgataaaaagcgggaaaagggaaatggatttttcccttttcccgctttttctgtgaaagaggtcgggctatatacccataccacaacaacgtctatcagctgttcggattaaactttttgtcatattccaataaataccttgccatatctggatcattgaaatcaactttaagtttaccggtatccatttttcgaatagtctccttatcctcttctgtcagttcaaaatcggctatatcgaaattgctcgccatacgatccttatgaatcgatttaggaatagcgacaataccctcgctcgtcagaaacttcaaagccacctgtgcattggttttaccatatttcgtaccgatagccttcaaagtctcatctgtaaaaagtctgtccgacccctgtgccaaaggtccccatgccatcaaatgcatcccgtagtcgttgattaattctcgcatcctcttctgttgggaaaagacgtgtgtttctaactgtaacacagaaggcttcacttccacattctccaccaaatctacgaatcgagcatcatagaaattactcaaaccgatagctcgcaccataccgtctcggtacgctcgttccatagctcggtacgtcccgtaatagtctccgaaaggctgatgtatgagtaacaaatctatataatcggttttcaattttcggagcgactcaccgatacttcggaaggccttctcctctcctgcattggaaatccacactttggtcgtaataaacaattcgttgcgaggtacaccacacgtctcgatagcccgtcctacgccgtcctcattataataggcctgtgccgtatcaattaatcgataacctacttcaatggcatccagaacgcaacgttcgcattcctccgaattaacaaggaatacaccataacccaacactggcatctcgacaccattgttcaatttaattgtcttcatttcagtcatgtattttatgagttcctattgctcttacagtcggcaaatccatatcgtcataaattggactctttctcgtgtccaatcccgcgatagctttcatttcctcatctgtaagaataaaatcgaagatattcaaattctctatcattcgttccttgcgcacggtcttaggtataaccacgatgttgcgctggttgagccagcgaagcacgaccgcccccacgcttttaccgtgccgtacagcgatttctttcaaaaccgggtgattgaaaatgtcgttctgcccttcggcgaaaggagcccatgcttcatgttggatgccctcctgttgcagaaacgtattggcggcttgttgctgaaaaaacgggtgagtttccaactgattcacagcaggtcttacctcattgtgcagaaaaagatcttgcaatcgttcgtcagaaaagctcgtcacgccgatagcgcgaatacgaccctctttatacaaccgttccattgcccgccatgccgcataataattcccatagggtttatgcatcagatacaggtcgaggtaatcgagacccagtttcttcattgagagatcgaatgcccgcagtgcatcgtcatactcataatcctgtacccacaatttggtggtaatgaaaaactcttcgcgttttataccgcttcgacgaatagcgctccccacctgttcctcgttaaaataagcggacgccgtgtctatcagacggtaaccgacttctatggcatcagttacaacacgttctgtttcattctcagggatttgaaaaacgccgaaacctatggccggcatcatcaccccgttgttcagtcttacatctttcatatctttctgatttgattgtctgttgcaaagttaccgcacactcatcgctctattgttataaaaatcgaggagaaattttcactattcgtggttttcggttacttttgagacaaaagaaaaacggttatggaacagacggatttcgacgggattgtttttgccgacactttgcaggacttcaataccttgcgttatgcggggcatattgttcatatcctttgctgcggcggcaatatgggatttacctttcaagacacacgctacaatattgcagtgggcgattatgtcattctgcctaatggagaactcggttctgagttttcaatatccgacgattttcaaggtattttaatgagcctttcggaaacctttgtcgcctctatcgctatccgtaacaattacggcattataggacatctatcgcttttacaaaatcccgttatgaaactttctcctcacgactttcggatatgtgaagctgccttacgagtccttcgtatgcgcatgaccgaaaaagggcactcgttttatgaagaattgctcggtagtctactgaccgcacatattctcgacctttacgatatccatgcccgtagccgtaacatttcgcaactgtcggaacacacagcctcgcaattacgtaaattcatcgaattactgtacaacggcgaatacatacggaacagggaactcgacttttatgcctcccgcctctgtatcaccccgcattatttgtcggagctatgtcgaaaagtaagcggccgcccagctacttattggatagaccgctttaccattcaggaaatcactcgcctacttcgccaaaaggaactatccctgacggcgatttccgagcgaatgaatttctcgtccgtttcttatttcagccgctatgtacaaaagcgactcaaaatttcaccatcggaataccgaaactgttatactcgggactgaacctactccaccaatacttgtcgcttggaaaacgtacgataatccatcggtgacattcctgtcaacgaatcgtatcttctttccttccctctttggaaaagcccatcgcaaacagacgaccgacgaccggaacccgaaaaactttgatgcaatggacaactttcgtataacgagcgaaaagggaaagacatctaaaaacgaagtctcgggaaacggattccaaccgttattctaatcaatcaaaaggaactacccaatcgtcagtttgcacggcttcgaagcagaggacgatttgctcgcgagtaactttgtcctcagagagtggcggcagttcgtccaaagcgaaataggcactaccctgtgtttctatattgggacggaacgagccgcctttgatttcgcacaagacaaaggctttatatacgttataggcatagggcggacggttatggagattgcgatcttgcaaagcaagcagacggacagcctcgacttcgagcccagcttcttcgagcacctctttctcggtattggttttgacggtttggttcacatcgacccaccctccgggcaacgaccacgtaccgtccctctcctcgaccaacaggatttttccgtcttgaaaaatagcagccctcgtatcgagtttgggagtctggaatccggtctcgccacaaaaaagatccgtcactcgttcaaaagacaatccggtctgccgactcactatctccgccgaaatttcgcgtattcgttgaaaccgctccaaatcgaacggatcttttgaataggtcaaacccgcttgtgcgataaactgtaattctttggcccaatcgagccataccaaactctcttcctgtcgttttttcatgatactcgttttgctattatacatatattaaacggcaaatccagccgaatagtgtataggataaacagtctctttcccaaaccataccaccgctaacgacacgtatatgatatttcttttgactttaaagacctcaatacctccccctgcgaccccttccatatctattctacccaaccccatgatgctacgggaaacggcaaataaggagttatcaatattattttttccctcgcaaaaaggagtagtttgagaaccgacacatcgaaaaaccgagttaaattttactttttattttcttgttttctaaaaaataagtatgttcgccaacgcaaaaaattcatcagatgatattatcataagacttattatggatataaatacaaccattcaaaagaaatcgctcgcagaggaagtctcctccctaatcagggaacaaataaacgacgggaaattgaccaagggagaaaagctacctaccgaaccggagctaatgaagctgttcggcgtagggcgctccactgtacgagaagccatcaaaatgcttgtaaacatgggatacttgagtgtacaacagggacggggtactttcgtggaaagcgttacagaaaccaatgaaccattccaccaacgattgaaacgagcagacatacaggaactgcgggaggtacgggacatcatcgaggctcccattgcccgactggccgcacaaaggagaacaaagatcgatctagaaaatatgaaacgatatatccaagaaagaggagaagccgcaaaatcgggcgacgtcggacggtgtatcgccgccgacataaattttcataactcgatagcccgagctacgcataacgagatattgtccgagctttaccacagcatgacggttcaccttacctccggatacgactacatttatgaggacaccacttatcttatgaaatcgcaaccgctgcacgaaaggctgttgcaccacatcgaaacaggaaatatagagtcggccatgcgagcggccaaactattatggaaggacgtaaacatagaaaaggaatccgatgaagagcattttaattaaactcaaagggcatccccatgtccaaaaaggtacagcctatacgatattgttcgccatgggtttttgccacctattgaacgatatgattcaatcggttatccccgccatgtatcctgtcttgaaagataatttcgggtttaccttcgcacaaataggcatcatcacactggtattccaacttacctcttccgttttccaaccttttgtaggacaatatgccgaccgccggcctcagccctattcattatccgcaggcatgtgttttaccctaacggggttattgctgctcgctttcgcctcgaactttttcttgattctcctcgctgtcgcgattatcggttgcggttcttcggtattccaccccgaagcatcccgagtggcacaaatagcatcggggggcaggaaaagtctggcccagtctatttttcaagtcggcggaaacggaggaagcgccatcggaccattactcgccgcattgattattattccttacgggcaacatgccgtcgggtggttttcaatcgcagcattgctcgcctctgccatactggtacgggtaggatattggtacaagctgacgctttcccaaaccggaatgtcgcatcgagctcaacaaacgacaagttgtaatttgagtaagaaagcaatccgcaatgctctgattatcctggtaatcatgctattctcgaaatacttttttatctcatgcatgacgagttatttcaccttctttttaatcgaaaaattcggcattacggtacaacaatcacaactttgcctatttgcttttctcgcggcactggccatagggactttgctcggagggttcctcggcgaccggtacggacgaaaatacgtcattctcttttctatcctcggtgcagcccccttcacactcgtactgccatacctcaatctgttttggacgctcgtcataaccgttatcatcggttttatcatcgcatcggccttttctgccatactggtttatgctaccgatttaaagccggataaagtaggaatgatctcaggtattttcttcggacttatgttcggactcggaggaatcggttccgcattcttcggctggcttgccgatgaaacgagtatagaatttattttcaaagtcagtacactgctgcctctattgggtatcatcgccggatttttacctaacataaaaccctcaaatcgataataagatgaaagcaaaagaaaatgcgcccctaacaacctcttcgaaagtcgctgtattgttcgaagtaacacctaaaaaagaatataaggaaacctacttgcaactcggagctatgttaaaatccgaattgacaaatatgcccggattcatcagcgtagaacgatttctaagtctgaacgaagagggaaaactactcagcctctctttttgggaaaacgaagaagcagcctccaattggcgtaataagatgaatcatcgtaactgccaaaagaaagggcacgacttgctattcgaaaaatacaaaatttccgtagccgaagtcattcgccaatatacaaaagacgaccgccaagaggccccagaagactccaaccgttatttgacaacaaaataacagatatgacagaatattttcaatacggagaaaaagaactcgcttacttgaaacagagggacaaacgcctgtctgaaatcatagacaaggtaggctgggtaaaaaggagagtcattccgaacctttttgcagcattggtacattccatcgtagggcagcaaatttcaacaaaagctcatgagaccatttggcagcggatacaatcttcattaggagaaattacaccccaaagagtcataagcctgaccgatgaagaattgcaacgctttggcatctcattcaaaaaagtgacctacattaaacgcgcagccacaaagatattgaacggagagttcgacattcacgggctttacgacaagaccgacgaagaggtcatcgaatgcttgtcaaaactcgacgggataggcatatggagtgccgaaatgctcatgttattttccatgcaacgcccggatattctaagttatagcgacctcgccattcaaagaggactacgaatggtatatcaccatcgcgacataacccgtaaactgtttgaaaaatatcgccgacgttattcgccttacagcagtgtggccagcctatacctgtgggcggtagccggtggagccatcgaaggaatgaaagattacgcaacgactaaaaagaaacgatcatgaatacaaaacatgtgattctaacacaacactatccctctccttgcggggatttaatactcggttcatacgaagaccaactttgcctttgcaactgggtgatagaaaaacatcagggcagagtggacaaaagattacaaaacctgttgaatgcggactataaagaagggaaatcggatatcattcaagaagccgcccgacaattagacgagtatttcaaaagagagcggacaacgttcgatattcccatactattcactggtacggatttccagaaaaaagtatggcacaaattattggaaatcccttatggacaaactctttcttatggtgaaatggccaaacgactggacataccgaacgccgttcgagccgtagcgaatgccaacggagcaaacgccctctccattttcgttccctgccatagagtgatcggtagcgaccggtctctcactggttacggaggcgggctcacagccaaaaagtatttgttggaattggaatcgatagctactgtcgggatattcgccagcagcctgtaacccaaactcaaacacttatcacccctatatttccccaccacgtgacactccctatcgcgctaaacgtgagcagagggaaagggttaaaatgacaatccaaattttctttcaacccctccgtcctacggacacctcccctattggctccgcaacaccccgcagcattgcggggcacggcaggggggagagggatatgcatcactctgttcccgttatcgaaggtattatcccttctctccttaccgtgtcccgtagtattacagggtactctgcattagcaatataaaggagcatgttcgcaaagggaaaggagctgctatgtatctgtaaaattggtacaactatccgtaatttatctacatatatcactaatattcccatttatctttgtattctgaaatgaaggtgatctaagttcggaaaaaagaaagcctataaaatcgacatttacaccataggctgttacttttcgaatcatatcgtcttatttctttccttgcaaatggaaaatcgagaagggaaaaaagaatataaaaaactcttttttattgattatgagcaaaaaaaattaaaaaatctttgtgtattttcgtagcgattttctgtactatgcccaacagatttatcgaaatatgtcatttaacagctaaaaacaaacctttatgttaagaaaaatcaggatagtcgcagcgactatctgtttcacgctaatcaccttattattcctcgatttcacggggactctgcatctgtggttcgggtggctcgctaaaatacagttcctcccggccgtattggctttgaacgtaggagtcgtcgcattcctcgttatcctcactttattgttcggacgtgtctactgctcggtaatctgtccgctcggtgtattccaagatatcgtttcgtggatatcgggtaaacggaaaaagaaccgattccgttattcaccggctatctcatggctgcgttacagcatgttggcattgttcatcgtcgccctgcttgccggattcacggctattgcggccctcatcgctccatacagcgcatacggacgaatcgcatccaatctgttcgctccgctctatcaatggggaaacaatttactcgcttactttgccgagcgtatcgacagttacgcgttctattccaccgacgtgtggctgaaaagcatacccacttttatcattgccctcgtcacattcgtctcgttacttatattagcatggaaaaacggacgcgcctattgcaacacgatttgcccggtgggtactgttctggggctattgtcccgattctctcttttccgccccgttatcgacacgacaaaatgtaacggttgccaatcgtgtgcccgcaactgcaaagcctcgtgtatcgatgccaaaaaccacctcatcgattacagccgttgcgtggcttgcatggattgcatcgaaaagtgcagacagggagctatacgataccttccccgaaaaaagactacttcggcatctgtcgaaccagcacatgaagacaaaaaagaaaatcccagacgagagttcctctcgttcgccggattgttggccggtactgccttattgaaagctcaggagaaaaaagtagacggaggtctagcggtcatcgaagataaaaaaattcccaaccgaatcacacccattactccgccgggttcgctaagcgcatcgaacatagcccagcattgtacggcatgccagttgtgcatatcggcttgtcctaatcaagtcttgcggccatcgggtaatctgatgactttcatgcagcccgaaatgtcgtacgaacgcggatattgccgtcccgaatgtaccaagtgttcggaggtatgcccgacaggagccatacgccccatcaccgttgccgaaaaatcgagcatacagataggccacgccgtatgggtgaaaaagaactgcatcccgtttaccgacggagtagattgcgggaattgtactcgacattgtcctgtcggagctatacaaatggttccgttccacggccgtcaccgccatagaggaggtcgtgaaaacagcgaacaggacaagaccataatgatcccggttatcaatacggaacgctgtatcggttgcggtacttgcgaaaacctgtgtccggcacgtccgttcagcgctatctatgtagaaggtcacgaacaccatcgtatcatctaatctccaaaacgaaaagcaatgaaaaacgaacataacaagaatttagacagaagggatttcctgaaagtattgggtggtgcggctgccgtcacatcggcaacccttcttcccggctgcaaaaacaaacaagaatcggcatacacggcgacaaccgatattcccaccgaccagatgacctaccggataaacccatcgacccaagaccgagtatctctactgggttacggctgcatgcgctggccgaccgtctcaaacaacagcgccagagacagcagcgacgatatagaccaagaaactgtcaataagctggtcgatgtcgccattgcccacggagtaaattatttcgatacatctcccgcctattgcaaaggccgctcggagcgggctaccggaatcgccctcagccgctatccgagagacaaatatttcatcgccacgaaactatcgaatttcgcgccctcgacttggagccgggaggcttcgatagccatgtatcacaattcgttcaaagaactacaagtaaactacatagattatttgttgctgcatggcgtaggcatggggaacggattacaggagttcaacgcccgttacatcgataacggggtcctcgatttcctcctcgccgaacgacaagccggacgaatacgaaacctcggattttcttatcacggagacatcaaggtattcgactatcttctttcccgccaagatgaattcaaatgggacttcgtacagatacaactcaattatgtcgattggaagcatgccaaagaagtaaacgaacggaacaccaacgccgaatatctctatggagaattatcgaaacggggaatacccgccattatcatggaaccgttattaggcggccgcctgtcgaatgtacatgaccatatagccgccaaactgaaacagaggaaaccggaatcgagcgtggcatcatgggcattccgttttgctggctcttttcccggggtattgaccgtactgagcggcatgacttatatggaacacctgcaagataatctgcgcacattttgtccgctcgatccactgagcgacgccgacaaagagtttctggaagagacggcacaacaattattgcgttacccgaccataccgtgcaacgattgcaaatattgcatgccctgcccttacggactggatattccgggtattctgctgcatttcaacaaatgtataaacgagggaaacatgccttcatcgtcccgagatgccaattatagcaaagcccgccgggcgtttcttgtcgggtatgaccgaagtgttcccaaactgcgccaagccaaccattgtatcgggtgcaaccaatgcgtgcaccattgtccgcaaaacattcatatcccggaagaaatgcaacgaatcgacaagtttgtcgaagacttgaaacaaggaagagaattttaaagcctcgttatggaatatagaacattaggaagaaccggaatccgggtaagtaccatcgctcttggttgcgaagggtttatgcacaaaaccgccgaagaggtcaaagccgatttcgatttcgccatagaaaacggaatcaatttcgtggatatctattcttcgaatcccgaccttagaagccatatcggatttgccttagagggaagacgagaaaatttcgtcatacaaggtcacctatgtaccacatgggaaaacgaccaatacctgcgtacccgcaacccacaaaagaccatagcctctttcgaagagcttttgaaacaactgcgcaccgattatctcgacatcggtatgatacattacgtggatgccgaaaaagattttcacacggtattcgatcacgaaatcatcgaaatcgcgcaacggttgaaagccgagggaaagatacgggccatcggcatgagcagccacaatccgaccgtggcgagcatggcggtcaaaacggggctgatagatgtcgttttattttccatcaatccctgttacgacctgcttcctcccaacgaagatgtcgacacactgtgggcagaagaaagttataccaacgctttgcagaatatagacccggttcgggaacaattctataccttgtgcgaaagggaaggcgtgggtatcgacgtaatgaaagtttatggcggaggcgacttattgaataaagaaaattcccccttcggccgggccatgacacccgtgcaagccatcgaatatgcactgacgcgtccgggagtggcggccgtcatggtaggctgcaaaaatagggaagaaatcgccgaggcagtcgcttggagccatgccactccacaagaacgcgactataccgccgtaatgaccggcttggagaaattctcgtggaaaggtcattgcatgtattgcggtcattgtgcgccttgtacttcaaaaatagatattgccgccgtgaacaaattttataacttgactgttgcacaaggagaaatacccgaaaccgtgcgagaacactacaaggcactcacacaccatgcctcggaatgcgtcgaatgcggcgcatgcgaagtccgttgcccgttcggagttaaaatcatagaatccatgcatcaggcagctcaacggttcgggttctaaacacagtaataaaaatgactaccgaaaaaaaacaagaaatcatcaatcggctttttgccgaacaatgttcctgcattgtttgcaataatcacgaaatacgcttgtttcacgaacgaggcgtaaaagatatttaccgattattgaaagaagaaccggattttctcaacggatcattcattgccgacaaagtcataggaaaggccgcagcggccttgatgatcttgggaggcgtaaaagaagtgttcaccggtgtcatcagtcggccggcactctccttgtttcaatctcacggcatagaacccgaatacaaaatcgagacagaatacattatcaaccgtactcgaaccggctggtgtccgttggagagtcgttgtaaaaatttggaaactccggaagattgtctcgcagagatagacgatttcatgaacacgatgaagaatatataaacgcatgaggacaaaacttttacttttattttttgcattaggagaaataacggcatcggctcaaaccgactcgttgccaaatataacgaaaacctcaaatggaaaactgatcgacccgatacaaatccatgaagtggtcgttaccggcactcgcaatgagacagatattcgtcatttgcctatgactatttccgtcatagaccgtaaacaaatcgagcagagcatgcaaccgtcgattctccctatacttacccaacaagtacccggactattcatcacagccagaggtatcatgggttacggtgtatcgggaggtgcggccggtggcatgtcgttacggggaataggcagcggatcgggtcgcttgatggttctcatcgacggacacccccaatatatgggactaatgggacaccctatcgccgatgcttaccaatcgctaatggccgaacgagtggaagtcttgcgcggaccggcctcggtattatacggctcgaacgccatggggggcgttatcaacatcgttacccgccaattacatgaagagggagtaaaaaccaacctcaacttaggatacggttcgttcaacactttacagagcgaagtcacgaaccgcattcgaaaaggcggatttaccagcctgataagcggttcgtacaaccgaaccgacggacatcgccgaaatatgggattcgagcaatacgggggatatgccaaactgggttatgaattttctccctattggaatatccgcggcgacgtaaatgtcacccacttcaacgcttcgcaaccgggtgaggtaaccgacccgatgatcgacgcagaccaaagtatcacccgcggtatgacctcggttgccgtagaaaaccgttatgaacgcacatcgggagctgtgagctttttctacaactggggagaccattggatcaacgacggttataccgccaaccccgacgacaagaataaccccaaaccataccggttcgactcgcacgacgatatgatgggcatatcgtggtatcaaagcgcacaactttttaccggcaaccgcctgactgccggagttgactactaccgcttcggtggcaaagcacaaaaccgttacgtcgaaggtgaacgaaacggagaacgtgaacacatcgtcgataaagtacagcacgaaatagccggttatatcgattttcggcaagacatcagccattggctcaccctcgatgccggtatccgtatcgaccaccattcgcatatcggtacggaatggattccacaagcgggattatcgttccatttacccggctccatcgaactgaaagcgagtgcaggcaaaggatttcgctatcctaccatacgggaaatgtatatgttcccgccaaaaaatcccgaccttcgcccagagtccatgtggaattacgaactggccttcgcccaacgtttactcgacggaagattgtcgtatggtatcaatgttttttatatcgacgggaaaaatctgatcgtcgccgtgcctcgtgcgggagcgacacccttgaacatgaacaccgggaaaatagacaacaccggagtcgaagtggaagctgcttaccgtattcacccccattggtcggtcgaaaccaattacagctatctgcacatggacaatccggtactcggcgcacccgaacataagttctatgccggagccatgttctccaaaaatcgctggactgtctccaccggcttccaatatgtagccaatctctacacagacgtagaccatgttcaaaccgaagatttcgtactatggaacatcaacgggtcattcaaagtcaccgaatggttcgacatttgggcacgtggagaaaacctcttggcacaacgatacgaaataaatgccggataccccatgcccaaagctacaatcatggccggtataaacgtaaaattttaatttctttcattcacacacatatatgaaaaagtacatcaatatcgccctatgcgctttcttatccgcccttatagggataagctgtaacacccgcgcacaaaattcggaaactcaactttccaaaaaggacaatgaaacgccaaaagtatatatgttcaaagagatttcccccgagaacttagtgaaaatatacgaagcgttgaaccgtaaagcgaccggaaaagtcgcagtaaaactatctaccggagaaccgggtggtcataacttcttgcaaccagctcttatcaaagacctcgtacagaaggtaaacggaacgatcgtcgaatgtaacacggcctacgggggtggaagagccgacacagaaagtcatctgaaagctgctgccgaccacggtttcacggctatcgcccctgtcgacatcatggattcggaaggagaaacagccctactcgtacacggcggtaagcaccttaaagagaattatgtgggagcccattacccgaactacgactttaccataatcctctctcatttcaaaggccatgctatgggaggattcggcggagcaataaaaaacatgtccatcggcatcgcttcatctaccggaaaagcatggatacattctgccgggaaaaccaaagggaacccgtgggaaaacctgcctgcacaagacgatttcttggagtcgatggccgaagccgccaaatcggtggctgaacattgcggtgagaaaatcatttatataagtgtagccaataacctatctgtggattgcgactgcgatgcctcccccgaagatccgaaaatgggcgacattggtatcctcgcatcactcgacccggtcgctctcgacaaggcttgtaccgatttggtgagagcatcggaagaccacggaaaaatccacctcatcgaacgtatcgattcccgtcacggtatgcatacgttggaatacggggaacaaataggtttgggctgtcaaaaatacgaactggtaaaactggattaataacaataaataataaacgactatgcaaacgaccacggcaaaactctattccttagagtataacaatgcgagaacctacggtttttccgccctgttcatagcggggaatattcttcttccccaattgtgccatacgattcatctgggtggccccatgctattgcccatctacttcttcacgcttatcggagcctataaatacgggtggtgcgtggggttgctcacggcagtactctcgcccctcataaactccatgctgttcgggatgcctctacccgaagtcctacccgcgattctctccaaatcgatattattggccgcagccgccggatatgccgcatatcgattcgggaaagtctctctactcatcttaacaggagtcgtactctcctatcaagtagcagggagccttgtagaatgggctattgcaggtaattttttcaccgccatacaagattttcgaataggcattcccggcatgcttctgcaaatattcgggggctatatcgttttaaaactaatgaccaaataataaaaccaaacctattcgcattttgcgagtaaaggaagaggaagtatggcgacaatacagagaggaaagcccaataaagggcgattctgagagaggcaagcggtattccgatttcagaatttcccctgccgcgcctcagcattacggggaatgactgcgcaggggaggagaaaattaaagatatcaattcaaatagcttctaacccttttgcttagagtacttctgtatgcgtggtcagaaactgtcatttttttaatggggctgtgtcgatgtcttgacacagccccattttctatattggattctaccaaacaataatattctgttacaaaattgttcccgatgatcgttacggttctgtcgtttcctccggagtaatcgttaccacatcgacactgtttttatgcccgtagaaaggactctgaggtttataagtagtattgggctctccggttctgtcattgatgtaataaacgttttgagccgggttgcaattattgatttctatggctgccgaccaactgatgttaattccaccgtcgccaatattccctataaaacctgatgatgacgaaatactcgaataacgtatatagacattttccgtctgacaatcgtcaaacgatacgcctcgatcgcctaacacttgtccgacaagaccgccggcctgatatcccgtgagatgtacatctgtcgcagaacagttttttaaagcggcgactctattcccggcacttcctccgcctgaaccaatccaaccgaccagacctccgagattttgagaaggagtagcagacgacttaatctgtatgtgtctgacgtgtacattctcgaacttgctgttcatactccactgattacctccggtataaccgatacaccctgcaaaataagagaactctttgctgtgatcgacgggttctccgtctacatcttttaccgggaactccgcataggcaagaccattgatcgttatattttcgaaagtaaggttcttcatgattccgtcgaatttaccccatacgccggtatatgcattatatctacccaaaacaaatgaacccagcttatactcatagaccgccccgaacttcccgctcatggaaaaattgcgcaacgtgtgaccttgtccgtcgaccgtatatgtcctaccgctggaaccgggataaatcgggctccactcgacaccgctcatatctatatcgttgcagatacgcaaagtaaaaccgggggtagccgcaagcatatcgtctatatgagtaggcagccaagcaaactcttctctcgtatagaccgaataggtattggtctgttcatcgtaagccggttgagaaggtgtgatttcctccggattccaccattcttcgccctcgatccattcgttcttgaaaccttcctgaatatctacatctatcgttccgcccacagtcaacagatttcccaaaatcgtagtgagataattcctttgtacgggtatattggttgtaaaatcttttgtaacgaccggggctgttcctttcaacatctccaaactgaaatgtatggcacgttgctcgtcgccggtaatgagatagtcgactaccaacgtacggttattcgcagtagcatcatatcccccttcataaaatttatcacctgtttcatcttgcataatcgctgcggtataaaccttcgaactttcggcatcggcactaccgacagcctcgccggtaacggcatttaaagcagagaaacgtacacaatcgtgataagcgaccttgaaattatcgggcatctccatgccttcggatgcccaatcggtggtaatcacacgaagttttgcaaacggacgtttcaaagtcatggcttcaccgaacgtttgtgtcaccgagatatttttcataaagaaataggcatctctactctcgtcgttcaattgagcatcaagcccatcttttatcgaaatgttggtaaaatcggacgtgttgtaatgcaaatcggacgtttctccttgttttacaaaatcggcccacgctacaaatttgtaggtattgttcggcgtaagacgaaattcgaaggaaacaggtccataggtatcgactacctgagtctggggtgcaacgagcaatgtcgcaccatcttcggaataaacagccacctgataacgaagatcgtacttactccaatctacgtttgtcaatcctccttgtgcactattcgtaccagtcaccgcacgtgtcacctgcaaggcttcgggagcttcgaacatgatacgcactacgtcgccattcgggttcaccccgggttcgtccaattcattggaacagcctgtcatcagtcccaacaaagccattcccgctaaaaaataataactctttttcatgatgaaatgatataaaatggttaaaaatatattctcaatcgggtatcaccacaacatgttcattatcgaaatcaccgtcaataccgatatcgccgcttcctatggtctttgtcaaaaacggccccttaataacggtctctctattgcgataaagaggtacgtcgatattctggtaatgatttatttctttcccattttcatcgtatacaaagacatctaccaacacgtgatcttcccgacgatccgaagcaagcacataatcataagccaaaagaagcgttccatcgtcggtcagtgtcgtgggagaggtttccattgtacgagtctcgacaaaagcattgggcatttctgttcccacattatatccgacactgacatattgcttgtatatgattttaatatgcaaatcgtccacagcactccttttctttctaaactcttgtaaatcggtagcccataaccgaaaacggccagaggctcgctccatatataccgaaaccatacgaccatcggcagcagccccagaagcatcatttcccgacaaactaaccggacctgctttatcatctcggctcgaatcgactgtaaaatcacaattcccggcagccgaatttttatgatgattatccaacggtttatgagatacattcgccctaacggcatcgagtttatcggtactgaaatgccaatcggcaggctcttccttcggcacataatcggcccatgccaacactttataatttccatctgccaaacagaaatacaatgtatcttgcggagcgtctgtcaatctttctaccgatatttcacggcgttccaccagattgcctttattcacatcgtccgtcgcccccggcatttcatacagctcgacaacaaagcgcaaacacaatcgctcatcggctgtgtagtttcccgaaaggacaggttctaaatcatttatcgaagattcaccctcagcatcatacgtcaattctttataatacacaggaggtgtacgatcggcattcagttccaccattacccatgttttctccgactcgggatattgatggatcgttttgtcacatgccgttacgaataacgacacaatgcaaacaaacgctatgatatgaaaaccgaactctttcatctctattcctatctgtttttcttattcctacgagcgaaagaccatttatacgacagatttactcctgcacgcgtaactccccaatagacatcggaaccggatttaaataaagcgccatttctgcgattacgataggcatcataatcgtactcggcaaaaccgactcctatgttaaactctattccccaccgattgtcctttccccatgaaaaggcatatccatagctcagccccataccccaaagcgcatggttaggatcttgataacgcgccttatcgtttatggcgacattgaaccccgccacatgagtatgcaaccctatgaaatgaccattcataaccgctcccggccaccaccgtacttcgggttgaaccgccagcaaacgcaacttacgagtcgatgtaatatcgtaaggcgaataccataccggaaggtctatcgaccagtgaggccacagctcggcctcaaaaccgagattggcggtcagcgcagcgacaaacaacaaattggtcttaacggcaatcactcttcttcgattttctgccgtattcatcggaaacgaagataccggttcccttacaggcaacgaatagtcgaaagataacctctcgacatttaccggaatacgttcaggccgttcatggcatacgatagccatacgtgcattgcggaacggagggaatatatcgcgaataattctatgccatgtatagcccttgtcaagagcgataatctgcgactttctccgttcattgtctttctctttccccaaaatatcgagaactttttctttattgggaatctgtgccccattcttcaatgcaacttcaaaagagtaccaatcttcccacagattttccaccctcatcaaatccttcggaaatcctgtctctttcgataaatatttcgccaacgcttgcgaacgatactcccccaacttatggttccatttcgagggcccctcgggagaagcgcttcctccgatccaaagataggctatacgtaccgaagcgtttttttgtactcggctcaacacttcgacgatactatccaattgtttattagggaacaaatcgtatttattcactttaaatataaccggtataatagaagaatgcgcatgataaaaaaccgaatctattttcccctcgggtaaaaaaacgacataatccgggtaactcttagaaaatgaagatataggggacttggattcttgagcttgaaccaagctcacaagcaatatccccaaaaagattagcaagattcccctttttatgtgattacacttattcactccgtgatttcatttaatattaaaattcaaaagattttttgcggtccctcttatgttaattattctgaatgcaaagataatttaccactcagaaattacatagattaaacaaaatctgttaaattataattttatattaacacatatagctaataatcaaacacctacaaaacatgtctcttgtataaaaaataaaagccacagcaaaactgtggcttttaagtgtttataaacattagaaattgtttcagaacatcaactttgctccggcaaaatagctacgaggcatagagggaccataaatataacccgaatctctttcctttccctgatcgaaatctctttgataagcgttaaaaatattctgaataccagcattcagttgcagagtgatgaatttatacaacgaaaaatcataggatattttcaggttcatatcaaagaaatcgggagtagttacagctatatccttcggtatgtaacctttcatgtgctgaacgatcatagaaccggtataagttcccgaaagagctatgttcagaggttttaccggagaatatgtggccgtaaaataaccataccaatcgggggtacggaatattcgcttttctgccggaacagaactatctttgctccatttttcaggccttgtataatgacttttctgccaagtcacacctgcttgtaactgcaccaaagaaagataggctaccttgccttcgaccgtcacccctgcaacctccgcaccctgtccgttacgtcgttcttttatcaccgcattgtgttcttcgtctttccctatctcttcaagaacaaaaacatgattcaatcgagtataaaaaccttccaacaacaggttacattgaaaagccccgaaacgacgatacatatcggccgaaagacttacactgtgggatttttcttccctcaaattctcagcttgtcttatcatcgtagcttctcctcctaccgcagcaacatgcaaatcttcatcatacgtttggggagcccgaaacccggaagaataacttaaacgcaaattcacatctctaacaggattgaaacgcaagttggctctcggactgaaaatgacatgatctatcagattatgtttatccaaccgtcctccaacaaggatactccaacgatcgttcttccattcgttttgcaaaaaagcactctcggtatgtacctcttgacgagtcttgcgattataccctttcatctcatctcgcaaattatcataattatattcgataccggctgttaaatcggcaggcataaacaaacatttatcgaaactgtatatgtattgagtacctgccacgacagtcaagtcctccgtttcgccgtatgcgttaagattttgttccgttccgtaataactgtccctgccgatatgctgagccgaagcatatacattaacccgatgtttttcatcgggagtaaacaggctataattcaaacctcctccgtcgatagaatgattcaactgctccgctatatcggcttcgtgcggcggacggttcaggcgatcgccacctcgtcgatattcactgatatgatgatattcaaacgttagtttggaataattgctggttttcaaataagagcgaaagcccaatgtctgagcctttaattcgggcaactctgtgaacccgtcgttatcgtggtcgtaaccgcttcgctgacgattctgcccgaaaatgtaaataccggctttattattgtcggttacgagcgaagcattcagcgaagtgctattgtcgaagtcgccgcttccaccaatagaagtgatactgtgcgctatcgaaccactattacgcaacggttccttcgtaataatattgattgtccccgctattgccgaagcaccgaataatgcagaacctcctccccgcatcacttccactcgctctatcatattggccggaatctgttccaacccatatacacccgacaatgcgctgaatatgggacgagaatccatcaatatctgtgtatacggaccgtcgagcccatttatacgtacttgttgaaaaccgcagttttgacaatcgttctcgaccctgacacccggctgaaaattaaggccttgtgccaaagagttggagttggtattttcaaacgtctttatattcaaaacattgaccaaagtcggcgctaattggcgtgtggtttcactacgattggcagaaacgacaaccccgtctaaaacaacggcatcctcttcgatttcaaaatcgatttccaaagtcgtccccctcctcagcgaaaccttacgacgctctgtcttatatcctacggaagaggtttcgagaaagaaatctccctccggcaaatttttcaaaaaatagtgacccgatgcatcggtcattacaccgatagtcgtacctttcaaaacaactgaaatatacggtaaatgttctcgtgtgttcttatccaatacatgaccgacaatattgatgtccaaagatttcgatacggcagtttcggcacataactgcccggcacaccacaggcatacccataataatatataattcttcatttttcgattctaaataataaaatacaatctgttgtccctaccttgaaataagataaggacaacaactcttttctcctaaatatatcatattacagaaccgaaacgggcggagctcgcaaaccatgagcgccccatttctcggaaatgagacagaaatatctggacgggaaaaacaaccggctgcaataagaaaacaaaatcaccgatacaaaagcccacatcgacggattctccgtctcgatactggacaacatgtgtatcaactgaaactcagccgttgtatgttcgtgttccgttcccggtttatacgggtgagaatggacaatcgtcactccattgactacatgcgagtgtgtgaacagcgaaatacagcctatgtacgaaatgaatagtacaggcagaaaatatctcgctattttatggagcaactgtttcaaaggtatttctattaaaaatacaaatttaagatttttttatcgattccgcaaaaattacaaaacaaacaccgtcatcatttatttcaaaactacgataattcccaatcaagcctttcttcgcatggctactattcggtcaaagcgtttctgagaaggaatcccgacaacaagttctttcggttcaaattttttatcgaactcaatagcctgagattcatctatattatatacaggattttcaatataacgtcctcttgcatcggataatgcgttttcatataactcgcacacatgcaacgcatcggcatacatgtcgtctgctgtccgtattcctaaggtctcggcaggcacaaatccccttcgcaaatagtagtcgggatccccgcataataagattgcacgaaagcccatacatttggctaaatttcgagtatggtcgatcaatcttttcccgatacccatgttctgatattccggcaacaccgaaataggccccaaagataaaacctcgtattcttttccggtatcggcttgaatgaccgatttcaaaaagactatattcccaacgatcttatcatcgaatacggcaacaaaatccaactgcggtacaaacgcccgactataccgcatgatatgaatcaaataatgttcgcaacacccgggagaataacgattccaaaaagcctcccgaactacattttctgtttcaggatagtccgagaaacgttcatttctaagttctatttccatacagacgtctcttttcactcatttttcacaaaaatacaaaatgcttcatataaaatagattttatcgtttacaacgatcggaatttatactccaatttacggttcgttcgtctgatataccaaatacaaatcagcaacgaaacaaatgtcgaaataggaggagcaaatcccatcagatgtaatgatgccgagtctatctgcccgaacagataagataacgggacacgaaaaacgaaagtcgctattatactatgaatcatagggaataacgaatttccctgcccactgaaataagaattgatacaaaacacgaaactgacgataatacagtcgatactatatccacgcaagtattcggaagccattgcaattacagccggatcttttgtaaagattccggttaacgtatcgggcaaaaactgggaataaacgcagaccgataccccgaatatcaatgccataccaattcccgaataaaggcagcgtttcattcgcaacaacaatcccgccccataattctgagccgtcatcgtagctactgccgacgatatggccatcgggggcaacatggcaaatacgataattttctcgacgactcccaatgctgccgaagcaataacacccatttgattgacaataacggttatcaataaaaatgatacattcaccaaagcatcctgtaaagcgataggcgctcctaatacaaaaatccggcgagaaagaataggacttaatcgaatatcccgacgggaaaaagggaaatgaaatcctcgtttatggaggaaccagagtgccgttaaaaaactaatgccttgtgaagataccgtggcaatcgctgctcctgccgctctcaaatgacaaaaaccgacaagaacgacatcaaacacgatattgataacacaagccaaagcgacaaaataaagcggagttttcgaatcgcccaatcctcgaagaatcccgcatacaacgttatatcccataataaacggaatgcctatcgaacaaatcagtaaataatgttttgcatcacgcatggcctcgaccggcgtgtgcatgagaacagcaatataattatgagaaacaaccataatcaacgtcaagaacaaaccgaccgaagcaaataggcaaatggacgtaccgatagaagtcacgacatcgcgataattcttcgcacccgttgccatagctataacgaccgtagtaccggtggtcagtcctaaaataatccctgtaatcgtctgcataacctgactaccaatggcaacggcagcgacactggcggcatcgtcgaaccaccctactacaaacagatcggctccgccataaagagcttgaagcagattcgcaatcaaaaaaggaacggcaaattgaagtagcgttttgagtacactccctttcgtcaaatccaattctttcataaaaccacttttaagaaaaagccggacaagagaatgattttcaccattcatcttatccggcattacaactatcattataataccctccgatgaggattttccttatttttcgggtgcaaagatgggtctaaattcgctacgaaccaaattcttttataaaaattccgaatcgtcttttattttcccacggcttcgggaagtgcgacgaatgtatatccttctctctgcaatacacgaataagccgttcgagatagcgctcataaaacttatcggtacgtttgtcatcggttcctaaatgaaacaacataatatgaccattcaatccattgcgtttttcgacctccattaccctatcgtatatagactcgctactacgataattcttcatatcgggagtcgtatagtcggcattggtccatgtgccgggagtaaaattcacaagccttaaccctaatcctctcgcccaagctgaaatcttctcattataatattcataaggaggaatgaacagattggatcgcgatacatctataccagatttgcgcatgcgagcatatacatctaacatgtcttgctcgaactgtgcttgacttaccaaagtagagtcccgattttcccaagcacaatataacagatgcgcatcgccgtgagcccctacatagtgtccggcattgtacaaagtctgtatagtctcggggaaacgctcataaaattcgccggtgaagaaaaatgaacctttcacatcgcattttcccaaaacttctaaaatacgccgagcaccatcgctcttatcagcagccgtaaaaacaagcgaaatttgtttcttctcggcatcggtacggacgattcctccataagcatactcgtttctatccaatccgcgagatttcataccttccttttgcagagatgacagcaaataactgaggctggccgttccgtccatcgtaggttcattcgtagagtaatcttgtatatcgtcatgatatactacctctgattgaaaacgggcataaggatctcttctcgtcaaacgaacgcctctcaaactatcgaagatggacgaatatacggggccatcgaccaatccaccgactgtcgtaccaacacccaaagcgattaacggcgtgtgcggattgatgggataatcgccccataaaggtaactcggtaatcatactcgtaccccacggattgcacccgaataaccaatcgatcaacgaggactccatctcccgatatcggttatcacctgtcaattcacgataaaggcgacattgtgtagccatagcgactgtcaaattattggaacaccatattgccgggattccattcaaaaaaggatttccctgcgcccgttcataaactcgttcgataccactacgcaaattgcgtccaaactccttacttatgcgcgaatcgctcacactcgccaaatgataatgccctaaattaataaaaggataccattgatagtgacgagcactatcggctcccatccacggtgtaaccggttcgaatcttccatattcgacagcttcttgtaaaaaaagaggtttctcccgtagatacatataattgaacggctgccaattccatgtcgtcagtccagttacactcctcataaatgtatggagaaacgaccgaagctgtttggcaaactccgggattattcgctccatgccaataggcctcacgagctttaacaagcaaagtatcggccatatcgggataaaaatctttcaatatctcggctcccaatgcgaagcaagatgcatatttcccagccgtactggcaacaccagtcgttgcattggagaactcgcctcgcacctgaggctttcccgaacaataataaacaggacgtcccgtacctttcccccaaccataatctatatggtcttgcgagggtaatttaaagcctttgtgatctcggtcgtctgcaatttgattgtacatttcgcctttcgagggatccatacgattaagccaatccaacccccatttaatctcatcgacaatatcgggaatgccgtttgctccgggtaaaccgtatgcatcgtacacatctccatagacctccggatttttcaaataggcaaacatcatttgataggtagcattagccgatgtggtgacatattgtaactggtcgctcgcatcatgccaaccaccccgaacgtcgattcgttcgccatttctcgtcgggtgataaacgatatatccatcgtgaatatggcaactgtcccgttcgaacggattaaaaccgcaacgttgctgtcgcatataccgcaagatgaaatcggcggttccgtcatatacccgattacctatgacaaaccgaggagacatagtttcccctactcttaacacataagttccctctgttttaaaatcgctgaaatcgagacgataaacagactgcatacgtccccatgtattcgcctttttcggattatcaaaccgcttcacaatctccccggtaaacacctcgacaagtacatattcttccacagcagcttttccttcgctcataaataccgctaccttaggagattcgggcaaataacctaattgattgatacgaatccattcgcccgcagacacagatgaaagaagagaaacaagccctattatgataccggaaatactgtacttcatacaccttatgattttgtggatccgggggtctgtttccttatcaggaacaataaacctatgaatgtgaacagagcattcaatatcagtaattcataactgaacgaataccctccgaaccaagtctgagaattccgatctaatataaagcaaagaataggtgaaagtatggcaaccaatggtatgtacttatcttttacctgcttctttacaaatataccaaaagcaaataaccccaatataggaccataggtataactggctaaaatataaacggcatcgatgacactcgtattattgagcaagttaaaaacaaaaatcacaatacccatgaccacggccatacccacatgcactcgcttacgaagcctgacaacttggtcttcgcttttacctttcacacccagaatatcgactgtaaacgaagttgtcaatgcggtcaaagccgagcctgctgccgaatatgccgaagatataagtccgacaacaaacaaaattccgacaattacaggaaaatatccttgtgtcgcaatcataggaaacaattcgtcactcttttgtggagcttgaatgccgtttatctcggcatatacatacaaaagaacgcccagcatcaaaaacagagatattacgaaaaactgcgaaataccgctagttatcatatttttttgagaatccttgaagttcttgcaactcaaatttcgttgcatcatgtcttggtcgagaccattcatggcaatcatcgtaaagacccctgccaagaattgtttaaagaaatatcgcttatcgttcacatcgtcaaaatagaacatgcgcgacatatccgattggtttatcgtctgccataaaccgccaaagtccaaatgcaaatcggtagcgatataataaatacacaatatgacagaaacaatgagacacacggttttcaacgtatcggtccaaatcaatgactttactccacctcgaaaggtataaagccaaactaatcctactgtaaaaattacatttaaaagaaatggtaacttcatcggcccgaaaacgagtaactgcaaaaccacacagaccaaaaacaatcttaccgcagcacctaacatcttggatatgaagaaaaaccaagctcccgtacgataggaagacatgccgaaccggttctccaaatactcataaatggaaactaagttcattttataaaatagcggaaccagcacataagcaatcagtatctgtccgaccacgaaacctaaaaccatttgtaaataggaaaagccgctggccgcaaccatacccggaaccgaaatgaatgttacgcctgaaatcatagagccaatcatggcaaaagctacaacataccaaggagatttacgattacccacaaaaaagccctggttatcggctctatgtcctactatataggaaataccgaacaacacaatgaaataagcaaaaatggtgatcaagacaacagcaggtgtcatttgtttttattaaatttaatggttattactcttcatataataaataaggacgacgttgctctctgaatttttctacgtcatcatgccacatagcctttatttcttcggacgatttccccgcctttatcatttcacgtacataatccacacctatcaatttctcgaaaaacgggcgaaagaaatgatctcctaaattaaggttgcgataagcatctatcacataatcgaaattaatacccttttcccatatttcttcattggataatcgagtcaaatccacaccgtaacatttcttattcaacaaaggaggatttttcgctcccggcacactacgaggagtaaaagagaacgtataacctaccatgttgggatgtccataaatttgaaacggccaatcggttccccggcccaaacttaccggagtcgcctcgaaataacaagtcgacggataaagatatatcgatttcatattcggcaaattaggagaaggaggaatgggaagttcatacatagttcgatgtgtataatttttacacggtattacagtcaaatcacaaatgcgaccatcggagagccaacgctccccgtttaccatacgagccaattctcccaaagtcataccgtgcactaccggtataggcaaccaacctactcctgatttatatttcatatcaagaataggcccgtcgatataatgaccgttaggattcggacgatccaaaacaatcaccatacgaccatgttcggcacatgcatccatcaacttaaccattgaaatatagtaggtataaaaccgtagtcccacatcttgaatatcgactaccagaacatcgaacatacgcatagattcgtccgacggacgtcctgattttccatcatacagcgaacttatttttattcctgtcttaggatcgatcgaccccgacacatgctctccggcatcggcatttcctcgaaacccatgctcgggagagaagatagttaccacattcaaaccctctccgaccaaaacatctactaaatgtctattaccaatcatacccgtatgattggaaaaaacggctactcgttttccttccaaaagaggataatattcagccgttctttcagcccctacgataacacggttttcctcggcttgaacaatagaaatactacaaatgaacaataaaaataagatttgctttcccatggcatttatccgtctcatagcactatatttcacaatttatttgtaaatgtaaacacattttcagaacaagacaacccgtataaaaatatttaatagattttataaactatatagaaagtcgttcccttttaaattataatattatatatttgtctaagaaaaatcaatatgatacaaacacccattttcaatgattaagtatactcaacaatcatttcataagaattgcaagttcatgtttacctccatatataatcgtattctaaactattgcaactcggtctataaatctccatcttccaaaaccgtaaaaaagatgaaagaggagtctgcaagatggtttatcgatttattgcaacaacgttattcaacgggaacaagcgactcaccatgcattcatacagggaacaaatgcataatcataatggtagacaataccatttacaatccgggattggcagacaagctacggggaatattgtctatttactccttatgcaaggaaaaacacatcgacttcaaaatcaactggacctatccgttcgaattgaccgaatacatgctccccaataaaattaactggattatagaacaagaaaaaatcaaatactctctatctgactctaaaatcgtagtcatcgacacattgcctaatattcatgcttcccgacaaagtatcatcgataaaaaaatattcgacgataccgttctaaactctcaatatctacaatatcacatctacaccaacagcatcatacatacccaagcgtttccaaacttattcagagaacttttcacaccctccgaaaaactacaatcactcattgatttacatcacaaaaacatcggggaaaaatatgtggccgcttccttccgattcctcgaattactcggtgatttcaaagactcagagggtatggacgaaatgcttcctcccagagaacagaagctactaatagaacaatgctatatcgaattaaaaaaattcatagatactttacccgaattttacaaaatattagtaacctccgacagtgaacgtttccttgcaaaagcgagtacactaccccgcacctatattatacccggaaaagtgattcacatcagatacaaaacaaccgatacttcggcctatatgaaaaccttcctcgatatgttcctattgagcggtgctgaaagtcttgttctctttaagaccggtaaaatgtacaatagcgggtttcctcgcttagcttcccaaattggtaacaaacctttcaaaatacacgagttctaacagtatatatatcaaatcgaagggcgtcgaaattgccataagtccggtaatcgtactattcctctctgctctcgttaccgaggggcttagtccttctctcctgttcagcattccggtacaggggtggggtttaatccgctaacgatgaagtgaaacgcctccggttaggttgaacttctccgacttttggataggaccgctaataagaagctgttttaaatttattaagaaataatattatcattgcaagcaggtatgttccggccatattgagcccctatctcggaataaatttaaaacagcttctaaaaaaaagagtcccattctctaaacgggactctttccatacattacatttattttaccaaagagacatttgagaggaatcaacttgctgcgctttcttttgctccacagcagcctgttcttcggcttcacgcttctttttctcctcttctttccgttttgcaatcatctcgggtgtatcgggtctggtaggaattaaccagttatcatcgaatgaatcgagacccggaaaatcgtcttcccctgtgtttgtatcaacactcttagggggattctccgtaacttccttcgattcctctaccgaagtttttacattgctttttgtttcactttcgtcctgacgaacttcaaaactaattacggacgatgtgtcttgtttctcttcgactggcgtaacggtttccggctcttgtttttcattcgtgtttttcacaaatttcaaattctctatctgtgctaatagttcttgtcgttgatttcgcaatgcggctaccattgcattggcattttctaaatcgcttttcagcgactcaatttcgtttttattaccgacatttccctgtgtcacagcctgttctaatttttctttttgttctatcagatcattcagtcgagcttgtagttgtttgttttcttcctccacggattgcaagttgtctaagagttgtgctattttttcatctttcgatgcttttatctgctcaaactgttgcaatttaatttcgacttcatctactaccttcaacccattctgtgcttcggatagctgaatttcaagctcttttatctgctttaagagttgtgaatttttatcttctcgttgcattaagtcttgtcgagctgcttccaactgacttgcaatctcggtctctttatcttttgcctgtgatagttctttgcgagcctgctgtaaatccatgcgaagttgctctacatcggatatattttctttctgtgttttaagttcggctcttaacctctcaatttcggcagaagctgcctccaattcttcttgatggacattagagactttcaatttattcaccaaacttttattttccagttcaaactgctctttttcggcttctaacgcagcgatacgagcttccagctcatgcactttttccgccaccgcccgtttctgtcgttcggcgcttaattgagcactttgcatagtattacgctgctcttccaattctttcatttttacccgtgcctcttccatttctttcgttaaattgaggtgttctgttttccatttccgtgaaacggattcacgggcacgctcatttaccgcacagataaattctttaaacggtttatctaatcgatcgaagagatattttttctccgcttccttatccagtgcggccaatatataatcgggaagcgatttgttcaataattctaacaatgtatcgagcagcgtatcggggagttgcagttcctcctctttgtcttctccaactctcgaagcagacggagtaacgtcactctcattatcctgtcgctctttttcccgaatacatgcattcgtaatattttcagcagtataaggttgagcctcgaattcatcatcttcgccagaaaaccccaacgctttcatcgtttttctaaatatagacataattttctaccttatttattttcaatttgttccactccgggctttgtcaccagacctttccctttgcgtccgtttatctctatcaatacaggagcatcaaatttaacaattctcaaagattccgattcgtacacagcagggagctcattcagataactttcatcgtaatagccatcgcctgcaaatgtatttaccgtaaaatagccaacaccaaacgaagtcaaattctgaaagaaatgcgttccctgacttggttctatcctataattatcaagtgcggactctacaatgagacgggctgatgatatatgcggccatttaaccggaattcccagtgaagagtcactcgacccccatcgcccgggccccaccaaaatatagttttcttcccgctcggtaaaggtacgatttattttctctatttcacgtgctatatttacattatttgaggacttaaaactcgatgattttacatagacaatatgagatacattatccatcacgccgtgtcccaacgccgtattgcttttaagaatggttctttcgtcgggtaaatccattacttcgtcgctaagcatttccttcatatcgacaataggccttatctgcaaccaatagaccgtaccgggagtattacccggccctacaagatttcccgcaaactctatttctaccggccgtcccatttcacgactgccaatggtaagcatagaatcgagaatagaggctaacggaaaggcttcatgttgcaagatattggcaaacgtaacgactttgcgccccccatcataataaccgtcccggatcatctgatcgacaggatcgtaagtagaaaccatcaaacgaagggaattgtctttctcggcatcacgaacggagagtttcaacaaattgaagccatcgtcaatagagaaaggtttttcacctctattcatatccaacgcatagaatcgtgtttgtgtatctctcaacgccaaatcgagtgtactggtttgcaatactttattgggatgccgtggagagaatcgtaaactgcgtcctccatcgacaatatattttcctaacccaatggccaaatcgacaactccatcttcggccttttcgtcattaataggataatagtttatcgaacgccctactcctgcaaatgacggataataacgatcgttgtattgcgtacctaccacttcctgcaatataatcgccatcttttcttgatcgataacattcgacgtagctgtcatataggctttactatcggcgtaaaaaaccgaggcataaacagcttttatagcatctaacagtaagcggagcatctcgttcttatcgtccaacgagggtatcatataggtagaatagataccggcgaaaggttgatagtgggaatcttccaacagactcgacgaacgaacggcaatgggcttacccaccacatcgaaaaatgccaaaaaatcgggctttaattcttcggggagcttcgctttaagaaaatgctccaaaatttcttcatcggaaatatcggaaagagctatttgatagagattattactctccataaaggtatcgaatatatcggtacacaaaactaccgttttgggaacggtcacattcacgccttcgatattatcgaaagtcggatttctttttatcatggcgtcgataaacgccaagcctcgtcctttcccccccaaagaaccattaccgatacgagcaaaattggagtatttgtcaaaacggtcacgcttgaaaatggcaactactcccctattcttcatttttctatactgcacaatagcgtcgaaaatgagtttacgaatctcagatatctcactcaaatcggtaatttgtcgaggctgcaaggcttcggccataggaaaaatagcacgcgaatagagccatcgggatatgtgattacgagaggcatgataataaagagagtcgtcgggaataatatctatattgtcttgtaaatcttttagattttttattgtcacgataggctctcccgtattaggattgatgaatgtaaaatcaccgaagccgaaatttttcaatatcgtttttctcaaatcgaccggcaatttcttagaatttttatccaagaatgaagcgttgagcttaatggcttctttttgattttcgcgttcggaagactcgataataagaggcaagtaaggatcgcaagaacgcacataggtgcaaaattttattcctgcttttttatctttttcgcctgccctaacgaacgaaacatcggatacgatacctagcatgtttcccgaatatttttcatatatctgcatagcttcctcataagttcgtgccaacattactttgggacgcccccgcatacgcagcattcgctcgtgatcattcaaggcttcggtcgaaaatatttgggattgcttcaacacaaaattatacaaattaggcaaaatggaagaatagaaccggatagagtcttctaccaatagaatgagttgcacacctaccgaagtaatatcgacttcggcattcattttatcttcgatcagcttaataatagccactaacaaatcgacattacccaaccaactgaacacgtagtccaccccactcaaatcttcctttgctatacgccttgaaacttcgtgagaaaaaggggtcagaacgacaatagggatataagggtaaagacgtttcatcgcctttgcctgcgtaaaggtctcggaacaatcgactccgggcatagttataatcaagtcataacgtttcaaagccaattcctcgaaggcttcctcattggtcgttacctgtttcacccgaggaggcgaactcagattcagagaaacatattcgaagtaaatttgttcctccacccgcccgtcttcttccatgataaaagcatcatatcggctcgcaacaagtaagacattgaacactcttttttgcattaagttagcaaaagaggtatctttcagatataattggttaatattcggtcgattcattatttttgtgtcgattccggctttcaaattgccattttattttttgcgattttattgttcaaaagtagtaaaaaaaatttttttatccatataaatatgtacatttgcgataagagaaacgagcatcttccaaagagatgcccaaccaagaatttaacttaataatatcgcgactatgaacatcgagcacatcatgacatcattggcggcaaagcaccccggtgagtcggagtatttacaagcggtacacgaggtgttactttccatagaggaagtttataaccaacaccccgaattcgaaaaagccaaattgatagaaaggcttgtcgaacccgacagaatcatcaccttcaaagtgccctgggtagatgataacggcgaaatacaagtaaacttaggataccgggtacaattcaacaatgccataggcccgtacaaaggaggaataagattccatgcatcggtaaatctttccatattgaaattcctcggattcgaacaaacattcaaaaatgcactgaccactctacctatgggtggtggaaaaggtggttcggatttcagccctcgtggtaaatcagatgccgaaatcatgagattctgccaagcattcatgttggaattgtggcgtcatttaggccccgacaccgacgtgcctgcgggcgatataggcgtaggaggccgtgaggtcggctacatgttcggtatgtataaaaaactgacgcatgagcacaccggaacgtttaccggaaaaggtctcgaattcggaggttcccttgttcgtcccgaagcaaccggctacggtggactttacttcgtaaaacaaatgctggcaaccaaaggaatagacatcgccggaaagagaatcgccatcagcggattcggcaacgtagcatggggtgcggcatcaaaagctacacaattaggagcgaaagtagtcaccatttcgggacctgacggttatgtatatgatccagacggtatttcaggtgaaaagatagattatatgctcgaactacgcgcatcgggcgaagatatagtcgcaccttatgccgaaaaatacggagtacaattcttccccggaaaacgcccctgggaacaaaaagtcgacatcgctcttccttgtgctacacaaaacgaactcgacgaagaggatgccaagaggcttattgaaaacggcgttatctgtgtgggtgaaatctccaatatgggttgtcgtcccgaagctatcgatttatttatcaaacatcgtatcatgtacggaccgggcaaggctgtcaatgcgggcggcgtagccacttcgggattggaaatgacacagaacgccatgcacatttcatggagcgccgaagaagttgaccaacgtctgcaccaaatcatgagcgacattcacactcaatgtgtaaaatacggaaccgaagcggacggatacatcaactatatgaaaggagccaacatcgcaggtttcatgaaagtagccaaagccatgatggcacaaggagtcgtttaagatttcgaataatgcgaacataatagagaaagggaggagataatctttatctcctccctttctctattataatgaagttgcctacgaaccaagtcttgcatataattgtttctccaacagaaaaacccataaatgccatacgtatgaaaaagatattcctatcattcctgctattctgcaccctaagcacaagttatgcaaagatagatatagaacgaatcgaccctccattctggtggaccggaatgcaagaccgagagctacaaatcatgttatacgggaaaaatatcgccgactgtaaaattaagatagattacccgggcgtaaccttaacaaaagctgtcagtctggacagtaaaaattatttattcctttatctgagtatcgcccctgagacccaacccggcaatttcgatattcaactgagccgaaaacgagagaaacaaaatatcccatacgcactcaatgcaagaaccatacagggaaaaaaccggaaaggattcgacgcaacggacgtactttatctgattatgccagaccgtttcgccgatggcgacccgtctacaaacgtcattccgtccatgcgatttccttcacccgtaaatcggaacaatcccgatgcccggcatggaggggacttaaaaggtatcgccgagcacttggactatatcgaagacttgggcgtaacggccatttggctgaatccggttctcgaaaacgatatgcccggagggtcgtatcatggatatgcaacaaccgattattatcgggtcgatcctcggttcgggacaaacatgtattaccgggatttgataaccgaatgccataaccggggtatgaaagtcgtcatggatatgatattcaaccattgcggagaccaacatatctggttcttggaccgaccatcgcacgattggttcaacttccccgacggttatcgacaaacgtcctaccgtcttactccccacttcgatccttacgtatcggaatatgacaaaagcatgaccgtagaaggttggttcgtagagagcatgccagacttgaaccagcacaatccgcatttaatgaaatatctgactcagaatagtatctggtggatagaattttcgggaatcgacggcatacgtatggatactcacccgtatgtgtttttcgattccatgtccgaatggtgtgccgccatcaaccgggaataccctaatttcaacatcgtgggagaatgctggtacggaaccgaaaccggttcggcctattggcaacggaacagcattttggatacgtcacgtaactcccacttgaaaagcgttatggattttccgctacaaggtataacccgtgatgcgtttacttcgcaaaccgacagttggggcgggctgaatctgatctacgaccaccttgcactcgacttcatgtttgccgacccaatgaatgtacttaacttcctcgacaaccacgacaccgatcgttttctgttgtccgaaccctcccacttgggcttttacaaacaagccatcgcattcctattgacaacccgtggaattccccaaatctattacgggacagaaattctaatgcacgggagcaagcaaaagaccgacggattggtccgcctcgattttccgggaggatttccgggcgatacgattaacgatttcttatcccaagaccgcactcccctgcaaaacgaagccttcgacttttgcaggactctcttgaaatggagacaaaacaatccctgtctgtcacacggggagatgatgcacttcatgccgaacaacggattgtatgtatatcgccgcagctacgaagggaaaaatgtgttggttatcatgaacgggaacgactctccactgacggtcgacatgagccgttataacgagattttatcggaagtacaatccgcccatgatattattacacaccgacagatcgagttctcccccattatggagtttcccccaagagctttatatatcttagagtattaaccgggcgaaaccgagaacgacatcaagcgatattttccctatcttcgataatcattggaatcgggaaaaggttgaatactttttctcaccagctaaaacataatcatgctgataaaacaagagtctgttcagagtactttcaccaacgtgagttcgtcgtctcttaaccgagctgtcgcccaatttatcgatgtgacagtatacagactgcaaggggcgatgtcgtcggccatattacgaagatagatgggattatgaataatagcctctcctaccgtgagcaaaggattgccggagagctgttcccgcaatatgcgacagaactcctctttttcctgttcgaaaccgggcgacacgacaaacaacacaccttcacaaaaggtagtcaaggatacttctcgctgaaacggcaatatattatcaactttattgtcgaaagtgagatagagaatgtgtttattgagcaacgaccgcctataacacaactgatgcgaaaagaatcctttcttcataatccaatgatcttctcttatgaacctaacttttttaatttggtaacccgttttgcaacggctttcttagattcgccacttacgaccgactgctctggcatatacacctgattattcacatcgagaatacgatcgttatagtgcttacgaatcaacatcaaactatcgatatataccttctcccgaaccgattgctccggaagaacgatatatccgtaaagacgggacaacgccgtaacagaatcggattgtaacggcaaagagaaccaccctcccttatctatatcgattctgttgtatgccaccccattatcggtatgacgtacggccatatatacttgcgggttcacgcttaatttaggtagcatgacgactttaaatttcaactcgaaataatcgcgagtacggaagttttcatcgggagcgatatcgaacgctaacaaattggtagataaccgggagtcgaagatatggctccgcctttgtttccatacatctacactatcgcccggctgcgacatcgtttgggaattttcttctgctaacagttttttggcctcctcattttcggctttcaatcgttccaccacacgatcgtatattttcatataggtttcaatatgatgcccataccatacaagagtcgtgtcgaactgttcccgagtgactccatgccgcaaaaatacggcttctcttatttttttcttatcggcattgttgttatagatattatagttcgattctatgacagcttcggatttgtgtatatcgactaacaaatcctccatatctttctcactaatgacataatccggagtacggctgccacatgccgacaaacataaaaccaaccatatgatccatatcggatttttcataaagctattcggatttctcaacttgtttattttcggaagagagataacgatgataaaagagaatcatacaaaccactccgaccgaaatcgccgaatcggcaatattgaataccggacggaaaaactcgaaccgctcacctcctatccacggtatccaatcgggccaataaaaactgaacagagggaaatagagcatatccacaactcgcccatagaatagcccagcatacccgtctcccggcacaaaagaagctaccaaagggggaacaggatcgttaaacatcaatccatagaacaggcagtctacaatatttcccgcagctcccgctataatcaaagccaagcaaacgatgaatcccgtagcgacttggggacgattcttaattttcagcatccaccacgacagaaaaacaacggcaacaatacggaacagagacaagaatagcttgcttcccacttccatgccgaaggccataccgttattttcgataaacgctatataaaaccaatcggtcactcgtatagattcaccgatatacatgtgagttttcacccatatcttcacggcttggtcgacaatgagtacaagaacaatcgtaataagagcaacctgccctctggtcaatttcttcatatccaaaataaaaagattctcactttttcctatttcaaaaagattcgaccttcgtgctttctatccaaagaacagcccccgaaggtcgaattttaatatcacttttcaacaagtttcataaaaactgccaatccactctacctgtttccacaaagaacagattgatatggataccggcaaactattttctttttccatcttccttcgcgtcaattcccaaagtcgcatgagggacagcacgaagtctctctttcggaatcagcttaccggtctcccgacaaatcccgtatgttttattttctatgcgtacaagagcagcctgcaagtgctgaataaacttcatctgccgttgcgccaattgtcctgcctcttctttggagagagtgctagcaccttcttccaacaccttaaatgtaggcgatgtatcggtaacatcattgccatcggtattcataatcgaggctttcaacaaatcataatcacgatatgctttttcgagcttttcattaataatctgccgaaattcttcaagttcagcatcggaataacgtgttttttcactcataattattgctacttaaaattccacattcaattattcaaagaaccgaccacaaacggaaattgttctatatccggtcaaatataacagaaatatccctacggacctccattatttcatggatttaacaattctgatattcaccttaaacgtatcgaagtccagctcggtgactgcttctccggaaagagctcccaatatctcaaacgtattggccaagacctgtcgagacatatagtcgcgatattcctccacaaccaaatcggtctccccgttcgaagcgatatatacatcgattttatccgtaatatcgaagcccgaagttttacgaatattctgtatacggttcaccagctcgcgggcaataccttcgcggcgcaattcgtcggtcaccgtaatgtcgagagctaccgtaagattaccttcgttagcaaccaaccaccccggaatatcctcagagataatttctacatcgctcgcttcgatagtagcttgttgcccatctatctcaaaagtaaaagttccgttcttttcaaattcgataatatccggttgcgacatagaggctatcgtagctgccaactgtttcataatctttccataacgcggaccgagctttttgaaatcgggtttgacccgttttaccaatatacctgccgcattatcgacaaacttcatttctttcacattcacttcactcagaatcaaatctttcacggcttcgatatgagtctgttgctctttattcaataccggaatcatcaaggtcgtgagcggctggcgtactttgatattcactttacgacgtaaagccaataccatcgaagtcatagtctgagcaatctgcatacgctcttcgagagccaaatcgatataatcgttgcaacttaccgagaaatcggccaaatgtaccgatcgagtatctcgtccagttgccgcagtaaggtctgtatagagccgatcggcatagaaaggtgcaataggagccatgagcttggcaactgtttcgaggcaagtataaagcgtttgatatgccgacaatttatcttccgtcatcgttccgccccagaagcgtttacggttcaaccgaacataccagttactgagattgtcatttacaaaatccgatatagcccgccctgcacgagtaggctcgtaagcggcaaactgttcgtcgacttctttaatcaaagagttcaaaagagagataatccaacggtctatttcaggccgtttttccatcggaacctcgggttcactgaatgtgaaaccgtctacattggcatacaaagcgaagaaagaataggtattatacaacgttccaaagaacttgcgacgaacttcctccacaccttccaaatcgaatttgaggttatcccacggcgaagaattggtaatcatataccaacgcaacggatcggaaccatacttttcgatcgtactgaacggatcgacagcgttacccaatcgtttggacatcttgtttccgttcttatccaaaacaagtccgttcgaaacaactgctttataggccacgctatcgaaaaccatcgaggcgatggcatgcaacgtgaagaaccaccctctcgtttggtctacaccttcggcgataaaatcggcaggatatacttcccgcttgtcaaatacttctttattctcgaaaggatagtgtatctgcgcataaggcatagcacccgaatcgaaccaaacatcgatgaggtcgctctctcttttcatgggttttcccgaaggggaaaccaacacgatatcatctacatacgggcgatgtaaatctatcttatcgtaattttcagccgtatattcgccggggacaaaaccctgtttcttataaggattctcattcatcaatccggcagtaatagatttctctatctcattatacaattcttcgaccgaaccaatacaaatctcttcactcccgtcttcggtacgccaaataggtaacggagttccccaataacggctacgggaaagattccaatcttgcaaattttcgagccacttcccgaaacgtcccgacccagtagactgcggtttccaatttatcgtgttgttgagttctatcatgcgatcacggcaagccgtcgtacgaatgaaccaactatcgagcggataataaagcacaggcttatcggtacgccaacagtgcggataactatgtacatgtttctcgattttaaatactttgttcgtttgcttcaacaaaacgcaaatatcgatatcgagcgtggcatcatcggccgtaagtgcggcatcataagcattttttacataacggccggcatattcgccataagctgccacatctatgttctgcttaacgaaatcaggttcgaggtcttctatcagatagaatttaccggtcatatcgaccataggacggcgattgccgtctttatcgagcatcatcaaaggaggaataccgttggccttggctacacgatcgtcgtctgcaccgaatgtaggcgcgatatgcacgataccggttgtaccttcttcggttgtcacgaaatcaccggtaataacccggaaagctccttctcccggatttacccacggcaacagttgttcatactccattccggccaaatcgttacctttatattctgcaacgactttccacggaatgagtttgtctccgggcttgtaatcttccaacgaaagcccctcggctttcggattgaatagagtccgcacgagaactttcgccactattacactaatgggtacaccggtataaggattatagctctgtacaagattgtaatcgatattcgggcctacgcaaagagccgtattggaaggcaacgtccacggagtagtggtccatgccaagaaatagggttctccgaaagcggtcatttccgtacgcggattcttaatcttgaattgcgctatacaagtcgtgtccttcacatcacgataacaaccgggttggttcaactcatgtgaactcaatcccgtacctgctgccggagaataaggttgaatggtatatcctttataaagataatttttattatacaactgtttgagcagccaccacaaagtctcgatataacgattgtcatacgtgatataggggttcttcatatctacccaataccccatacggtgtgtcaagtcttcccattcgcgggtaaatttcattacgtctttacgacaagtcgcattataatcggccacagaaatggttttaccgatgtcttctttggtgatacccaaagccttttcaaccccaagttcaacgggcaatccatgggtatcccacccggctttacgcttcacatgaaatcccttcatggttttgtaccggcagaatatatctttaatggaacgagccatcacatggtgaatgcccggcataccattggccgaaggcggaccttcgtaaaatacgaatgaaggacacccttcgcgcgtttccaaactttgatgaaaaagatcttgcttatcccattgattcaaaacctctttattgatttccgagaggtcgaaacgagaatattcggtgaatttcttgcccatatatttcttaaataatctttgcgtaaaaatcggcacgaagatacaaaaaaagctgtaactaagaaagaaacaattacattattacagaaaggaaacgaacggaatttaatcctcaataggaacgtcgacccaattacctttacaaaattgccagacattggtgtacccggcttgtgccaaagcgtacaatgcctctatccggccggcatttattttctcgggataatgggcatccgaattaacgactacccgaattcccaaatcattcatcaactcgaaataatcatgattcggataaaaacgaccacgagtctcccaagccttcgtattgacttcgaccaataaatttcgagaagcgacttcttcaagatagtctgtcacccattttttataccacgattcacgatccaatcccggacaatagagagaggcattcaatcctattttatccaaatgtcccaaaaagtcgaagccccccagctcgatcatacgaaaggaactacgataaaatcggtgaactacctctttaacatctccatcgaaatacatatccacatagttccgaaatcgttccggtgatccatctgtatcgacaggcgtaccatcgggcgcaacgatatagtgtacagacccgatacgataatcgagaggaagggattgaaaatagtcgatagaaggattgaacgaatcgtctaagaaatctatttcaagacctatatataaatctatctcggaggaatacagttgcttcaaacgacgaaattcttccaaataggccgtcattttctctttttgcatattacaaccattctgtacaggaaatggagcatgagaggaaacaccgtatgaagaaaacccttctttcacagcctcccgtacaaaaagttccataggggcatgcccatcacaaaaatcgcaatgagaatgatagttagtcaaattattcataacgacactaatcgattatttctttatagcccccctcttcgatagagtacggagaaaccggataaacaaaaatgacaataacaacgtaacgaagacggctatgcccagcgaaaccgaataggacaatcgaaacccttcctgagcaaaaaatatgtaagtaaccgtcaccatcgtcataaacagcgccggaatcaaagtgagccaataacatttatgttccttagccaaccaaacagtcaatgcccacaatgtaaacacagccaaagtttgattacaccatgcaaaatagcgccaaagcacttcgaaatcgatcatcatcacgagccatgcaagaataaaaatcggaatagaaaccaatagtctatttcggattttcttttgaggaatatgcaaaaaatcggcagcaatcaaacgcgccgaccggagcgcagtatcgcccgaggttatcggcgccgcaatgacaccgagcatagccaaaattccaccgaaagttcctaaccagcccaccgatatatcattgactaaaatagccggagttttccctttcaagaactcagaaagtgcatcgaatgacccattgaaaaaggcaatcgccgcagccgcccaaattaaagcgacaataccctcgacaaccattgccccatagaatacccgacgtcccattttttcatttttcagacaacgagccatcatcggagattgtgtagcatgaaaaccagaaatagcaccacaagctatcgaaataaacatcataggaaatatgggatttacatcagagtccggtcgtgtataacctatcgcttcgtgaaattccggtaaactgtctggacgcaaaaacaaagatatcataatcccgatcgccataaacagcaaagcaaatccaaataaaggataaagccgccctatcagtttatcgataggaagcaacgtagccaatatataatacccgaatataatagcaatccacatggtcgtggtcgtattttcccccgtaagtaaatcgagtagattagccggatttacgacaaacacagcccctaccaatatcattaaaagcagagagaaaatccgcatgacctgcttaactcccgaccccagttcatcgccgaccaactcgggcaggctagccccattccgacgaaccgaaagcatacccgacagataatcatgcacagctccaccgaatatagtcccgaacacaatccacaaataggccgaaggcccgtaaaggatacccataatggctccgaaaataggccccaacccagctatattcaaaaattgtatgagaaaaactttccatgtcggcataggaatataatcgataccgtctgtcgaggtataggcaggtgtctgcctccccggattaaccccaaaaactttttcaaccaaagcaccgtaaacgaagtatccggcaactaacagcaacaaagcaatgcaaaatgtgatcataccaaactcttatgtaaattcatggtcttgacaaactaacttcaatgaaaatcaattacccgattcatctaagctatttatccaatcgaacaaatttccataccatcttatgtaatggaatgttacaaaggtaaaatctttttgccattctatcaactcaattaaaaaaaagctgcatccttacgtcaagaaatgcagcttttcactatttataaagcaataccctctttggctggaagtatctcaatccaatagtcgtctggatcgtgaataaaatagagtcccataacttcattctcaaagcatacgcatcccatttctttatgataggctctcactttattataatcgcccgatacccgcacacacaagtgactttcgttttcgcctaactcgtatacatctttatggtctctcagccaagtgagttccaacaaaaacggagaaactccatctgtaagatacaccaatacaaaagaaccatcggcagcctcttttctacgaacttcggtaaaacctaatgccttcgaataaaattctatactgcgatttaaatctgttacattcacattaaaatggtcaaattttgcttttacttccatgatttataagcatttattatataattactgaatctctcgtactacttaataaaacaaattctgtaccgtatcgcttcgctatcggagcaaaggattcggctttacgcactgccggataaaagtgcatagggacaaacatacctacattaaattccccgacaaactgctctgcacctctcatataatcctttcccaatcgggcatcgaccggaaacatcgccacatcgatagacttaatagcccgcttcatataatacaattccgataaataagcagtttcagcttcccgcacctcttcttcggtagattcgtcacgccaatgccaattgtttaaatccccagcatgaaaaattgttttaccctcggctgttaccaaataggacacccccatatcggtggagccgaatgcattcacccgtaatcggtcatcttcataactttctccccgatcgagatacacgatattcggcaaccccgaaagctcgtccaacgaggacatttcgcaagggaaaatataatgtatattggttttcaaatttttccaagtcagtatttcgggattataatggtcgcgatgttcgtgggataccaaaacatacataggctgccgcctacgcaaagccttctctatgatattttcacctcctcgataataatcgaatatgattgaaaaatcctcggcttcgatcaaaaacccgctatgaaaaagataaatcagcctcatatattcgttttaaacagaacgatcgaaagacgacgattgtttaatttgcatagccagagcttcggcacaacgttccccatcgatagcagccgaaacaattcctcccgcataaccagctccctcgccgcatgggtaaaatccccgcaaacgaatatgagtcatcgactctctatcacgtggtattcgtacaggagaagaggtgcgagtttccacccctatcatcacggcttcccgggtgaggaatccatgagatactttcccaaaatatttgaatccttcctgcaaccgggcggcgataaaatcgggtaaccagaaatgcaacggcgaagcgatgagtcccggtgaataagaggagcgaggcaaatcgaacgaattgcgacgattgacaaaatcggtcatgcgctgggcaggagccgtctgtttgcagttcccgttcaaatagcactgccgttcgagatcctcctgaaattttatccccgccaaaactccaaacatagaaaaccgggctccgaaatcctccggctgcaactccacaaccatacccgagttggcccataccgaacccctattcgacggggacataccgtttacaacaatttgttcgggaccactggctgccgggactacaaatccgccggggcacatgcagaacgaatagacgcctcgccctttcacctgcgtgacaaagctatatttggcagccggaagatatttcccccgaccttcgggattgtggtattgaatggaatctatcaactgttgcgggtgttccaatctcacacctacggcaatacctttggattccaactccaccccgttctcgtgcaacatataataaacatcgcgagccgaatgccccgttgccaaaataacagggccggtaaattcacgaccatcggctgtaacgattccacacacctcatcgccatcgataatcaaacgctccattcgggtctcgaaatgtaccgcaccacccgattcgataatacgattccgcatgcgctcgattaccctcggcaacttgtcggtcccgatgtgagggtgagcatcagaaaggattgaaaccgatgccccgtgctgacaaaaaatttgaagaatacgctcgacacttccccgcttcttgctgcgagtatagagtttaccgtcggaaaacgctccggctcccccctctccaaaactataattcgactccgggtcgactctctgttcccgactgataagagctatatccttgcgacggtcatgcacgtttttccctcgttcgacaacgaccggacaaatacctaactcaatcagacgcaatgccgcgaaaagccccgccggcccagcccccacgacaatcgcccgaggcttacccgaaacatcgccatactcgatacgggggaactcgtcgtcttgcgggaattcgtcgatgtatacccgcactttcaaattcaccatgaccgtgcgctgacgggcatctatcgagcgtttcaataccctcacagactttatcgatcgtatatccatactctgctcccgagccacatatgctgctatgctttgttccgaagctgcttgttcgggcagaattcttaactgcaattctcgaatcatattctctatatcctatttatccgaacagttgccggaaggcctcctcgaccttacggacagcaactaattctatcgccaatcgggaagtatcaaagcctttcagattattttgaggtataagcatacgtttaaaacctaatttttcggcttcaagaatgcgttgttctatccgattgaccgggcgtatctctcccgaaagcccaacttcgccggtcatacaagttcctgcctcaatcgccatatccatattggaagaaagtatcgcgctgattacggccaaatccatcgcggggtcattaacttttatgcctccggcaatattgagaaaaacgtctttttgtgccaatttgaacccgaccctcttttccaaaacggcaagtaacatattcattcgccgcaggtcgaatcctgtcgccgaccgttgcggcgtaccgtaagcagccgtactgaccaacgcctgtgtctcgataaggaaagggcgtataccctctatcgtaacagcaatggcaacaccgctcaaaccttcgtgattttgagtcaataacatttccgacgggttgctcacctcacgtaacccgctttgcctcatctcgtaaatacccaattcagaagtgcttccgaaccgattttttatcgagcgaagaatacggtataaatagtgtcgatctccctcgaactgcaatactgtatcgacaatgtgctccaacactttcggcccggcaatgctgccttctttgttaatgtggcctacgagaagaaccggcgtattggtctgtttcgcaaatttgagcaacgaggcggcgcactccctcacctgtcccacactacccggtgaagactccatcgcactggtagcaatcgtctgtatggaatcgataacgacaatatcgggagcgacattacgaatatgcacgaatatatcttcgagcgatgtctcgcacacgatataacagtcgggagcgttcccgcctattcgctcggctctcaatttcaattgtcttgcgctttcctcccccgatacatataataccttctgtccttttagagcaagtacagtttgtaggatcaacgtcgatttaccgataccgggctcaccgcctatcagcaccaatgatccccgcacaagaccaccacccaatactcggtttaattcgccgtttcccaaatcgattcgcgactcttccgtgatctgaatatcgtctatccgttgaggacgtactttactctgttccatcgtgccgaactcgccccgaccaccggccgcggatttcgtgctcactacctcttccacataggtattccactcgccacaaacgggacaacgtcctatccacttgggcgactctgccccacagttattgcaaaagtaaaccgattttgtctttgccatactatttatactatttgcctcctacgaaactcagcacatgtgatcgctgctgcaaccgccacattgagcgactcggaagtaggctgcccgaccggataattaggaatatacagccttttcccaatataaggttccaacttgaccgatataccatttccttcgttccccatcacaattacccccgatttcgtcaaagaggtatgataaatatcctccccatcgagaaatgtaccatacacgaccgacgaatccacctgagagagaaaatcgggtaacgacctataataaacttttacccgagccaatgcccccatagtggcttgcacaaccttagggttataaagatcggcggtatcgggggaacaaacgatatggcgaataccgaaccaatcggccaagcgaacgatagttcccaaattgccgggatcttgcaccgtatccaaagccaacaccaactcctttttcagagtctcgatatttaaatgatattcgggtatgcgatatacagccaaaacatcgggcggcgtaacgagctgagaaactttcgacatctcttgttcgtcgacttcctgtatcttagacaacgattcgtgagcgtgcgaaacaatccaagacggagtagccaatatcaaatcacactcgaaaaccgacagtgtgtcttccacgagtttattaccttcggcaataaaacagccctcctctctccgtcctttctttcgagctaacgattgtatgcgtttaatttgatttttactaagcattcttatccggtaattcgaaactaaaacaagatttttctcccgaggtaacccaaaggctctcttagtttcccgccctcataatccatgcattcgcaaaaagaggctgctcctgtaccaaacgagaatggtatcgacgagcttcatcaaaatcatcgaacgatgctacatagagtcgtgatttacgtgccgtctcataaatctgtaaatcggcagaaacgccctgtcggtgaaaacactcgatttgcttctcagccatctgttttgacggaagcgaagccactataatatagtaggtatttctcgctgtttcgatatcgtgtatagcggtttccaaaacattttcttcccccgcggcaatcgtatcgggcatttcatcgattcccaaaacggattcaaaatcattaacgacagcttcgtcggtcgtagtatccgcctgaccgaataactcggcagacaataatccggcataattggcagtggtatcgggtgtattgattggcttagaaagcattaataaaaacacaattattgccgctgctactgctgccgcacgcaccgtacgacgatgaaacgatatatatacacggtcacgaactttttcggcttcaaccgtcggtatctccctatcttccgcatcttcctcacgaggagttatttccaatagggagaaaccgaagcggggattctcgatagaattattttcctgtggctgaaaacacacgttaccatcgactaagaccaatcgtcccaaccgcccgaaaccataatcgccaccttgctccaagtgtttataaacagattcgacctcttcggcaatagcctcaaccgcctcgttccaagaaataaaaccggcacgcataaccgaacgaaccaataacccggaatctcccgtcgcaacggattcaaatgcgacttttctcacaggtgggagaaacgatgtaccgcccgattgtatcttcgcttcgtcacagagaactgtaaaacggcccaaaccgggtataaaaacatcatcgttatgcaacaataaatactcaatatggcgtaccaatccaatcatacaacaaaggtatatattttcttttgccggtacaacaaaacgaataaaaatctctctttattcttgtccctgaaaaatataaaaaggattctattcctcttccaataaacgctcggcctctttggaatcataaccaagttccacggctcgtttcaaatcggccttcgccgattctctttcatacctcgccaatttgcccaacgccctcaatacatatactaccgggtcatcgggagccaactcgatagccttttctatgtctttatcggctttggcatattgtccggcgaacaaataggcttccgcccgccctacatagagtatctccttttcgggatttacccgaattacctgcgaatagacctctatggcttcgggataataacccatcactttcaacaacgaagcaaaacctatgcgaccgttggcactcgccggattcaatttcaagattcgttcaaaatcggcacggctcgaaatcgtatctccccgctccaatgcaatcagtcccctgtgatacagcgcatcttcgtcggtatcgtcgattaacagtatctggctataatcctgataggcacgatctatactgtctatttcggaaaaaagagccgcccgattccgcaacaaagtgaccgaatgaggtgtcatcaacaatccattcgtataactccgaagtgcagcttcataattacctgcataacgttgtaccgtacccaaattggacataagcaacgaattttgcccattcgcgggctcggttcgcaacgcacttaccaatgccgactctgctcccgcccaatctttcgccttgatgcaactatcggccctctctacccattgataataggactgtgacaatacataaaagggtaaccctaccacacaaacgagaaccaaaaaatttttcatatcccatattttatataacaaaggtacgggtttagacgttacattcacatattagatatgcaaaaacgaatcaaaagcaacagacattctaaatttttctgttaattttgcaaatgatgagtaatcataaatttatatatagtattttattcagccatcggattatcctcttcttaggaattgtcattctgttttcgggatgcgccaacgaagatgaaccggaacaaggacctgtaaaccgtacggtactgatttatatgttgtcgaacaacaacttaggatcgacataccgtttcgatacgcaaaatatcaacgacatgttacaagtcgctgcatcgggaggtctaaatggaggaaatctcattatttaccgcgacggatacgatacaaatcctcagcttatacagattaggaaaaacgaatctggttcggctgaaaaagcgattataaaggaatacccggaccgtaactcggctaccacggaagtcatgcgttcggtaatcgacgaaacgaaagaactatttccagcgaaagaatacggattgatactttggtctcacagcaccggctgggctccgggaaactcctcgttagctctttcaccggctcgacggtacgaattgcccacacgctctttcgggcaagacggaaaaaattatatggaaatagacgaactagcagaagctatacccgataaacaattccacttcattctcacggacgtttgtttcatgggtggaatagaatgtgcctatcaattacgaaacaagaccgattattatataggatcggcagccgaagttctaggagccggaatgccctactcgttgaccattccaaaactattcgattatcatctcgatctcaaagatgtttgcaatacaatctatacttattacaatgctcaaagcggagcatatcgcacatctaccgtgggattggtggactgccatagattggaagcattagccgatagtatccatgaaattttcgaggctcatcgaaacgatgccatgcccgatatttccaatatccaacatttcgatcgtcaaccgccatatatttgttttgacttacaagattttctatcgcaaatcgctactcccgatgaaaatacagggttggagcaagccctctcccaagccatactctaccatgcggcaaccccttcggtcatgggagatgtctccatttacaaacattgcggcctgagctgctacattttaggaacaggaaacacgaccctcgaccgatattatacgacccttgattggtacaaacgagtctatcccgacaataattaaactcttaattctattcataatgtcaattttcaattctttacaatccttactggctcaaacgccagaagttccggctccggaagagatcgcccaaacgtggcaacaaaaattatcggcactttcgtctctatcgttccagcaattcatggaacaagccatcagtgccatattacacggagcagtaaaaatagctatcgcactggctgtattttttatcggaaagtggatcatcaaccgtatctatcattttatctccaaagcattcatacgccgtaacgtcgaactgtccctgcggacctttctactcagcttgatacgcatcatcttgatgcttattctcatcgttatcgtgataggaatactcggtatcaacaccagttcgtttttagccatattcgcctctgccggacttgccatcggtatggctttgagcggtacgcttcaaaacttcgcaggaggggtcatgatacttctgttcaaaccctataaagtcggagattttatcgaagcgcaaggttattcgggaaccgtaaaggaaatacagatattcaataccatactcaatacaccggataacaaaacgattatcatacccaacggcggattatcgacaggcagcctgaacaactattccaaagagggacgccgacgtgtcgactggaaaataggcatcgcatacggcgacgatttcgatacggctcgcaaagccattctcgaactgcttgcagcagacaaacgagtattcgatgacccggctccgtttgtagtcctaagcagtctagccgatagtgcgatcgaaataaccgtacgagtatggacagcttccgagaattactggggagtattcttcgactttaacgaacaagtctacaaacagtttgacaaatacgggctgcatttcccttatccgcaagtagatgtacacatgatacaagacaatcaataatcatcgtatcgaacgagaaaggggcgaataaatttttgcccctttctcgttttcttataaaacacaaaccctcgtatataacagtttaccgattctttatatacccgtatcgtaaaacagagaaacaatgataagagacgtaaagccacaagatgccacagcaatcacgaaaatttataacgaatatatcacaaacagcataatttcattcgaaaccgaacctttaaccgaagaagatatgctgtcacgtatcgtgcaaatatcgtcgaaatacccctatcttgtctatgaaacagactgcatagtggtcggatactgttatgcccatgcatggaaagaaagagctgcttaccgatatacagcagaaacaaccgtttatttatctcccgcatacacaggcagaggcataggaactctgctcatgcaaaaattaatcgaagagtgccgtaacaaaaattatcgagcattgatagcttgcataacagacgacaatatagccagcaagtcactccacatcggactcggattcaaacaagtatcccatttcaaaaaagtgggactaaaattcgaccgatggttagatgtcgtggactatgaattattactaacgccatagcactatttacactcattgtttgaaggaggttaaaaatttgaagatttataattttaattcctaaaaacggctcaacattgaatgtctttttataactttacggcaataataaggtgaaaaaggattgtctgtaaaaaatacatctccttctcactgcgatagtctcatgaaggtaaggaatttaaggtaatcctacctcgtacactttcccggttatatcgtcgaaaatatctttctcgattatataatggggcattaagacagataaaaaataaaaaacatataaatgataagtaaatggaattacttaccccttacatcaaacgaacaacaaatagcccggacattaggggaccgatatccaaaggtccctgcactctgtaagctactcgctcaacgaggggttacttctgccgccgaagcggagaagtttttcaagccccagctgtccgatctccatgacccgttcttaatgagagatatggaaaaagctgtagttaggcttaatcgtgcattagggagtaaagaaaaaattatgatttacggagactacgacgtagacgggacgactgccgtatctctggtatataagtttttacaaaactattattcgggactcgactactatatccccgaccgttatgaagagggatacggtatttccgacaaaagtatcgactatgccgccgaaaacggtatcacgctgttcatcgctctcgactgtggcatcaaagccgtagaaaaaatagcttacgccaaaagcaaagggatcgattttatcatctgcgaccatcacatgcctgatgaccaattgcctgatgccgtagctatactcaatcccaaattagaaggagaaacctatccctataaacatttgtcggggtgtggcgtcggctacaaattcatgcaaggatttgccatcaacaacggtatcgacataacttccgacctggaaccgctgctcgatctcgtcgccgtgagcatagcgtcagacatcgtacccataaccggggaaaaccgaatcctcgcctatcacggtcttaaacgactcaactccaatcccagcatgggtttaagaggtatattgaaagtatgcggattgaataacaaaaatattacaatcagcgacatcgtattcaaaatagggcctcgcatcaatgcttcgggacgtatgcaatcgggaaaagaagcagtagacctgctggttgccaaagacatggcaggggctttggaaaaaagtcaaaatatcgaccagtacaatgaggatcgtaaagagctcgataaacgtatcaccgaagaggcgagcagaatattggaagagcatatcgacataaatcgaagaaaatcgattgtcatttacaataaagactggcacaaaggaattataggtatcgtggcctcacgcctgacggaactatattatcgcccggccgtcgttctcaccctatccgacggactggccacagggtcggctcggtcggtacaaggattcgatatttataaagccgtagaatcttgtcgagacttactcgaaaatttcggaggacatacctatgccgtgggattatcgatgaaagaagaacacatcaaggaatttacggctcgattcgaggaacacgtcgcccggcacatcttaccagaccagatggaaccgcaaatcgacatagatacagaaatcaatttcaatgaaatcacacccgatttctttactatgttgaaacaatttaatccgttcggcccgggaaaccaaaaacctattttctgcacccggcgtgtaaccgattacggaacaagccgccttgttggaaaaaagaacgaacacgtgaaattggaactggtagatagcaaatcgaaaaatatcatgaatggaatcgcatttaatatgagtcagcatttcgaacatatcaaagccggcaaaccattcgatatttgttacaccatagaggagaacacccacaacaatggttcgatacagttatttatcaaagatatgcgcccctcggaataatcctatttgacacaatataacagtagggagagatttcttgtaaatctctccctactgtttaccatttacattttcaaaaataaaattacaagacaggattgaatataatcatatctttaccttaaccgttctacctgcatatttaacaagataaatacctctttcttgtaaccgaatctccatacgctcgccagttgccggcaaagtttttaccaatactccgtttatatcataaatccaaacatacccttcggttataccatctattattattcggtcttcttttcccgaaattctcacagaattttgaatttctacaatccctgaaaaatcagattctacaatcataggaaaatctttccaaacatgagcattcctataagcagccaatcgtcctttcggaacatatagtacacaatccttcttatttacattatcaaagctactagaatcacaaacaggtggaacctgtcccaaacaatagatttgcaccaaaaacaaacaattttggaaagcacatttattaactgaaacgatactttcaggtaaagtcacagtttccacccccaaacagcctccgaaagcattttcttcaatcgatgtcactctatacgtctttgaataatcaaccacaggtggcccaataatctctccacccggtccaacaacaaaaattccatctccaccttgaacttcttcggggataacaattttcccaatatactcagtcgttcccctatctacaccaacggtcgcctcagactcagatgtaattttataataaatcttctcatgctcaaagtcataagcctttatgttaaaaatagtagagaaaaagcagccgaataataaaattctccgtatttgattcatctttctaactaaaaacacatatcataataacggtcaaactttatttttattatatatcgcttttttttagatattgcaaccctctttactttatactaatcaagaaataaaaaaaattcaaaaaacgcccctctgaccttgaacgaatcgataacaatcagatttatttcgctatttctacgtcataaaagataaaattgtaattttgcgccgaatctgtaaaaggaatgaacgaaattatccacgaagtattgcataaatattggggctattcccaattccgtcctatgcaggaagagattatcacctcactgctcgacgggcatgacacgttgggattaatgccgacggggggaggaaaatccctcacattccaagtttccacccttagccgggaaggtatctgtttagtaattaccccattggtcgctttgatgaaagaccaagtagataacctacgcagccgagggatacgggctgcttatctgcacgccggtatgacgcgccgtgagatgatcgttactctcgacaattgcctgtacggacgctataaatttctgtacatttcaccggaacgtctggatacggaattattcatcgctcgtattaaaggattgccggtttcctttatcgtcgtggacgaagctcactgcatttctcaatggggatacgatttccgtccggcctatttgaaaatagcggacatacgttatattctgcccgaagtccctatactggcactcacagctactgctacccccaaagtagccgaagatatacaacgtaaactatcctttcgcaacgggcaagttttccgcaccggcttctcacgtcccaatctttcatacgtggtaagacaaggagaagacaagctccaacaactgctacgcatactcaaccgtgtgccgggcagcgctatcgtgtatgtgaggaatcgaaaacgtacgaaagaagttgccgaagaattgcgcaaagctggtatctcggcagatttttttcacgccggattgaactcggaagaaaaagccgataaacaacaaaaatggaaagcagacgaaatccgggttatggtttcgacaaatgccttcggcatgggtatagacaaaccaaacgtaagggttgtcgtccatatcgaaatgccgaacgcccccgaagagtactttcaggaagcgggacgagcggggcgtgatggaacccgttcctatgcggtattactttatgcccgaagagataaagccacgttgcacaaaaggttgaccgaggaatttcccgataaggaatttatattgaaagtttacgaacgcgtaggcaattttctcgaaatagcattaggctatggcatggattcgatttacgagtttaacttgaaacgcttttgcaccacattcaagtatgctgccacacctgtactcaacgcgctgaaaatacttaccatttcgggatatatcgaatttatcgaggaaaccgactctctatcccggatcatgattctggtacacaaggacgaactatacgaattacgagaaagtgatccccaaaccgaccgtgtgctgcaatgcttgttgcgatcttataccggactgttcgccgactacacatatattcatgaagatttgttgtgccaacggctcggcatgaaccagcaggaagtgtatgaatcgctgctaaaactgaaccgcatgcatgtactgcattatattccccggcgtcgcaccccatacatcgtctatacccgggaacgcatggagccccgctatgtacaaattacccgtgaagcctatgaagagcgtcgagagcgtatggcagatcgcataaaaagtatgattacatacgccacctcctctcgctgtcgccaacaaatgctcctagaatatttcggagaaaaagcagattatgaatgtggctattgcgacaactgtatcgaacgaaaaaaacgagagaccgcctcaaaaaattctccgatacaaattgcgaaagagatacagcgactgctcggaaatggggcaatcagccgaaacgaaatcgtggaaagcctcccctatccagagaacgaggttatcgagagcttgcgctttttacaggacgaaggattcattaccgcctgcgaagacggtattcactataaaaataaataacagaaggtattcaggtattatcaagattaagtaaaaatgattaaaggtttttgttacatcatgcttttctatgtattaggagagatgatgagtctgctaatcgggaaactcattcccggcagcgtatgcggcatgatattgctattcatcgcgctcactttaaaatggatccgtccgcacgatgtagataaagcagcctcggcactcacccgcaatatggctctgtttttcgttcccgccagcatagggctaatgcacgaatataaaatactcatgagcaattgggtagtattactcaccgtatcggttgtgacaacattgctggtgatcgttgtcgtcggagtaaccgaagaacagctcgaccgtaaattatcccataagaaaggaggtgaaaaaatatgagtgaaatattttcttctactccctttatactcctattggtattgggaagctatttagccggctgcaaattgtaccgaaaaaaacacatagctctgtttcaccctcttctagtcgctatggtgcttatcatagctctcctttcattactggacattgactatgacacgttttgtgcaggtagtagtttcatcagctttcttttaggaccctcggtcgttgcactgggatatgccctttacgaacaaatcgagcaaatcagagggaaagagatacccgtacttactgctgtctttgccggcggtatcgtaggtatagtaagtgtcatagctatttgcagaatcatgggagtagacgagactatcacctcgtcactgcaacctaaatcggtaaccatacccatcgctatctccttgtcggaacactcgaatggcataccgtcgctcaccgcagttatcgtatttggctgcgggcttttgggcggtattgtcggtcctgccattctcgaccgctgccatgtcaacagccgagtagccagagggcttgccttaggttcggcggcacatgggctaggaacggcacgagccatcgaattgggagccgtcgaaggagctatcagtggcttggccatcgggctgatgggagttatcacctctttacttatacctctctttgaaagtattatgcgctaataatcaaagcataaaataaaaatatgactttataccgataaaattaagtataataatttacagataccgcttgcatattccaataaaagccgtatctttgcaacgcttttacaaaaagcaacaaggttagattcgctagctcagctggtagagcacaacacttttaatgttggggtcttgggttcgagccccaagcggatcaccgagaaaaaacaggcaaagccacccaatagggtggctttttgtatatatttttttgtaattcaatacccgtaaggcgagggtgtaacctttacgaacaaaaaatttataaaatcttttcaacccctttcctcagaaactaccgtttcttcggtagctcctctacacaagggggaaggtaaaatgcaatacatcgcattggataaaattcaagtctattccctcggattctctactgaaccccaaaggcacagtgtacgaatttcagccaacgagtaatcatcgtcaaacagaacgaacaggtatcgcagttgcttatcatcaaattcgtgccactcacgaggcacaatgagattgatcgtttccataaaaaagaatgttactataccacggcagtataataacattctttatacgtaaatgacaatagtattattgaaacaaatcctcgttgttctttgtgttcaatagtttatctaagattgcttgggaatttaattgattaagcaaactattaaaatcttcttcacattcaaatacaaaatatatagtttcatcaataaattcatttgatgaagcacttactttgggacaccatattgcaaccattttaccattatcgagaattaaaaagctcatagtaatttttcgatcaaatgcaaaccaccattttgaccccctccaagcaatcgatacagtagggaactttatgtcaaactctttatccatctctgtaacattattttcctttgctattttaacccaacttaggtatttgtctcgaacaagctctaatgatgttttaaaagattctaatttatttccgtcaacagataaaaaagctgattttgaacttttggcttcaacctctatataaaccgtttctaattcattgtttttttgagacgcttcaatagtgaaattctttccaaaataggcattctcaaatgttcctactgtttgttccgccttagatgaaatagaaaaaataaataaggctacaattaaagtattaaatttcttcatattataaatgtattaaatttcccgtgaatatatatatatatatatataaccaaacattttaatatgttttttagcacaaaaagggaaataacgcttacccgattgatagctaaacgatatttttcagaatcaatagtctttatgaccttttaagttttcaaatttagataaaaagaaggatttcgcagtgttaattcataaagttgaaacagatgttaagataaaaaaggaagacaactatttaactaaaaatagaataatgtatactacttttcaactacaacaatcttttctcctcaccagctttaaatacgacttttttcgaaactccattgaagcaaatctcagtttgtcctcctttaagggaagagacaattaatgatgcaacttctctatttttccattccatatcgacgacaaacccgccacgagcacaaataccttgtactttaccatcggcccaagactctggcaatgccggaagaagaacgatcttattggttgaagattgcatgagcatttctataacacccgaacacccgccaaagttaccatctatttgaaaaggcgaatgagcatccaacaaattcgggtaagttccacccccacgccgcgcatcttctcctttatagttatcgggactgacataccgaagaagcctacgatacatatgataggctttttctccgtctcgtaaccgagccaaaaggtttacacgccacccggtactccaaccggtcgtttcatctcctttaatttggagtgtacgggcacaagctgccgccaattcgggagtttcctcaaccgacaaatgatgtcccggatacaacccgaaaagatgagattgatgccgatgatatgggtcctgatcttgccagtcgtaataccactcttgcaaattaccgtccttcccaatttgatacggatacaaccgagaaagagtctttttaattcttttcctgaaagacttatccaccccgagcaccttcgaggcttcggcggcatcaataaggcattcgcgtatcatcgccaaatcggaagtgtttccataggaagtagctcccacatacccatcaggcgtaatgtacttattttcgggagaggttccgggagaggtcacaagttttccatctttctcgactaaccaatccatacaaaactctgccgcaccctttaacacaggataaaattcacacaaaaattccttgtccaacgtaaaaagataatgctcccaaatgtgagtagacaaccatgtaccccccatcgtccaacaagcccatgaagggtccccctcattaagaccaacaggacacgtcatcgcccaaatatccgaattatgccccaagcaccaacctcgctctactccataataatcctttgcggtttttcttcccgtcttactgagattagcaataaactctatcagcggatattgcatctctatcagattagccgtaccggaagcccaataattttcttcgagattaatattgactgtatagttactgctccaaggcggaagcacactttcgttccacaggccctgcaaattggccgggactcccggagtacgagagctagatatgagcaaatagcgtccaaattgaaaataaagttcctctaaatctggatttcgttgcttacaatcggtataaaaaagtaactgtttgtctgtcggcaatgccgcaatatcgtcatctgtatctcctaaatcgagttttacacggtcgaaataatatttatagtctctaatatgtgcctctcgcaaagcatcataagttttaccgatggcacacttcatacgtttttctacatgactgcgataattacgcccctctttaaccggatccttgtcaaaaccgttaaaactcgtaacattcgctacccaaatgagtacttctgtgctcccgtcaatctcgatacggctatccgaatatcgattctttactctcccatcgacacttaaaaccctcacaagagtcttaaagtgaatgcctctttccggatcatagcgatgcttatcttccgccttataataaaccgggaacgaatgataagccgcataaccttcaacagatatttcattatcggccacctgcgagctatgaggtaacggagaatcgaacgaaagcaacgcatgaattccttccttattttcagatttcaaacgaatgacaatcaccgaatcgggagccgatgcaaaataatcgctcgtaaaaagttttccgcccttcaagtattgcgttcgtgccgtagcattaccaatatcgagccatcggtggtaatcagaaataccaactgtatcatcaagatattctatcgtcaatgttccaagtggctgataattttcactgtaatgtccttgcaccttgtattgagccttatctgccccttgataatcctcattatccagtaaagctctgatttcgggaatagcattaaaagcatcgggagaagaattttcgctttcgggttctcctgtccaaagtgttatatcgttaaatgaaatcttatctttttttacaccgccatataaagtcgctcccatcgtcccattccctatcacgagagcctcttcgaaatactctgccggacgctcataatgcaatttcatattctcggcaaaaataaccgggagaataaaaaacatacacaaaataatccaaaaaactttcttcatcaccataactttatattgaataacttatttctaaatttctctccctaatttttattctataattttttatcccgtaatcggtactctatcgaatctccgtataaagtttgaagttcgaccaattcctgtttcaatttctcgattatactttcatatcccggcttatcgaaaagattgttcatttccgtgggatcagtttgcaaatcgtatagttcccattgatcgatatcgtcatagaaatgtatcaatttataacgttctgtacgaacgccatagtgacgttttaccatgtgttctgccggatattcataaaaatgataataaagagaagatcgccagtcttgcggatgctcgcccctcaataacgacatcaatgaaataccttgtatatcatcgggaatctccacaccggccaattcgaggaatgtcggggcataatctatattctgcaccaattcgataatatcgcctcgcttttgaaaacctttcggcaaacgcataacaagcggtgttcgcatagactcttcatacataaaccgtttatcaaaccagccatgttcccccatataaaatccttgatcggaagtatagacaaccaacgtattatccaataacccagccttttccaaatagtctaacactcgtccaacattatcgtccaacgacttcacgacttttgcataatcacgcataaaccgttgatatttccattcaaccagctccttcccctgtggattctcccgaaaaaatacatcagttatagaatcatataccgcatcataggctacccgatcttcgggagtaagccgttttatcttacgtccataggctttcttcaaacgtgacttcattccctcacgatacattttcgtatcataaataatatccatgtcttttgcaatactcatcgtttgcgcagcagccggccgccgaccctcgtaatcatcataaaaattatcgggcattgaaaactctttatcttcatataacgtgagatatttcaattcaggtagccagtcgcggtgaatagccttatgatgaataaacaaacaaaagggctgctccttatcacgacctttctccaaccaatctatacttttgtcggtaataatattagttaagtaacccttttctcgaaccgtatcattattcatcgttataaaatcgggattatagtaatcgccctgaccgggaagaatttcccaatagtcgaatcccgtaggcatactctctaaatgccatttccccacgatagcggtttggtaacccgcagtctgcaaaagtttaggcagcgtctgctgcgaaccatcgaatacacaagtcgtattatcggtgaacccattcgcatgactgtgtttacccgtaagcatacacgccctactcggcccacttaatgaattcgctacaaaactattcgtgaaccgaactccgtcccgagcaattctatccaagttaggagtttcgatatagcgagtatcataacaactcatcatttgtccggtatggtcatctgtcataatataaacaatattataacgaggaggaactttattttctttcttacatgacgaaaaagaaaaaacaacagtagtcgctgctactcccgttaaatagggagaaaaagattggaataatgttttcatagaatcatttaaatattagaaggtcttgtatctattatattaaacaactatttcttatttccgtgaaaataccgaaacaactctccataatccaacattttgtttctgctttcattggtactttctttgcgacaaatacaaaacgaactttatatagagtttactgttatatttgacttatatataattttgtcaaagataatattttttctcaaaaagatataaatcgaaagtaaacgaaagtttttttatcatttcgatttatttatgaccttgatttctatactaatcacaaaaaacaacaccctaaaagttcgaacttttagggtgagtcatttattataataaaattatttcttacctaatatcctccgcctaacgcatgataaagattaataactccctgtatctcttcaaaacgatcggatacggccgataactcggcatccaaaagggtctggcgtgcggtaagtacttctaaatagttctgtgaactatgacgcatcagcagctcggaactcctgactgccgattgaagcgaaataatttgctgtcgatccaaatccaatcgtcggcgtgcaacttgccattgtaacaaagcatcatttacttctgttccagcattaaggagtgtctggcggaaagtgagtaaagcctcctcttgtcgagcttttgcaactttcaaattagctatattctgtcctctgttgaaaagcggttgtaccaatgcccccaccgcagaaaacaaccattcccccggattagaaataatagctccggctgcattcgtccaccccgccgaaccacttagcgtaatggcaggataaaaagctgaataagcccgatttgtcgtataaaaagattcggctaatgcagcttcactttggcgtacgtctggacgcctctgcaacaactgcaaaggtactcctaccgataaagtatcgggaaaggactgcatatccaatgtcgaacgacctatcctctgaggaactactcccaataaagacgataaagaattttccacctcggtaatttgctgttctaatgacaataaagaagcatcgaccgacaatttactcgcttcgatttgagcaacagccatttcagtagtttgccccgctttctttaaagccttcataacgcgtaaattctctgcccatatctcggccgttcgtctactaatatcgagttgcttatccaacatcaacagtgtataataactatttgcgatcgtagcgatcaactgagtctggacggcttgcttatatgcttgactttgctctaacacagcctttgcctctcgtttggcattagtgagacgtccgaatatatctaattcccaatcggccgatgcagccaaattatacgtcttagtcggactatttccttctatactcttaattgttccctgcggagtaagagaaacggaaggcaaatacgccaacttagaagaggtcaacaaagcttctgcttcacgcactttcaatcgagctatattcaaatcggtattatttgctattcctttttcgataagctgctgtaaaaccgtatcggtaaaaagttctttccacgaaaaatcagcaagcgacatcgtatcttctgtcattgccggaactcgatacagactatcgactcccgataattcaggacgttcatacgtcctatatatgtggcaaccgctcaatccggccgataataacaaacctataattatccttttcatatcaatgattcacaagtttatttattttcttcaattttgggtaacttacgttccggcattaatctttcttgtaaagtttggaatacgataaacaacacaggaacaataaacaataaagctatcgtaccgattaacataccaccgacagttcctacaccgatagaaatattcccgttagctcctacacccgacgaaaacatcataggtaacataccgaatatcatggtaagcgaagtcataaggatcggacgtaaccgaacctgagctgccgagattgccgcttgggtaattgtcataccatgccgacgacgttccgaagcatattctgtcaacaaaatcgccgttttcgccaacaatcctatcaacatgattagtccggtttgcaagtagatgttattttccaagccaaacattttagcaaacaagaaacttccggccaaaccaaaaggaacggaaagaattaccgcgatgggaatgaaaagactctcatataaagcacataaaatcaaatagataaacacaacacatatcacaaataccaacgtagtggtactacccgacgatgcctcttccctagacattcctccgaactcgaatccgtagccttcgggaagtgtctcttccgcgacctctcgaactgcctgaatagcttgtcccgagctgtaccctgccgcaggtgtgccgttaacactaatagccgaaaaaagattaaaacgagacagcgtttcagccccatacacacgagtcagtgtcaaatattgactaaccggggacatttcaccatctgaattacggacaaacatattatttaatgcttccgtatctaaccgaaattccggtgaagcctgcaccatcactcgatataatttcgagaaacggttcatattcgatgcatagtttcctcctatatatcccgacaatacattcagcacttccgacggcgatactccgttacgtttacagcgggcagcatctacctcgaccaaatattgagggaacttagtatcgaacgaagtcgtggcacgtgcgatttcgggtctagcattcaaagcgtcgatcatctgacgcgtatatttcaacaaatcctcaatcgtaccccccttttgatcctgcacataaatttcaaatccactgctcacgccatagccaggaatcatcggttgtgcaaaagccataatctgtgccgaagatatatcgtctgtacgtttatatatttcattgataacagcatttatttcatcttcatcgtccgtccgttcgtcccagggtttcaaacgaatgataaacatgccgttcgatgccccttgaccgctaatcataccattacctgtcaccttagagaatatacgaacctgaggaatacccttgatacgcctgtcgatttcgtccattacaaccttagtttgctccaaattcgttccgggagaagtacgtacatctacaaaaatagttcccatatcctcctgcggcacaagtccggttttcgtcgttttcatcaaaataaacaatccggcgccagcaattaccaacaatacaccagctaaccatttatgtttaaacataaaaaacactcctgttttatatttcatcacgatacgatgaaatgccgtatcaaatgccatatggaaacgagaagaaaaactcattttgcctccttttccaatcacgtgaggggtcataatcaaagcgcacaatgccggacttaaagtcaacgcattgaccattgagatcgctaccgctactgccatagtgagaccgaactgcgtataaaacgttccggtcgtaccgccaatgaaacaaacaggtataaacactgccatgaaaacaaaagtggtcgtaatcaatgcagacgttatacctcccattgcatcgacggttgccaaataggaagatttatatccctcatcgaatttagcctgtacagcctcgaccacaactatcgcatcgtcgactaccgtcccgattaccaacaccagtgcgaacagagtcaacatgttcagactaaaaccggccgcataaaggaaagcaaacgtacctatcagagagacaatgatagaaatagaaggtatgagcgtcgaacgcatactttgcaaaaatacatacacaacaaatatcaccaaaaggatagcttcgaccaatgtttttatcacgttcttaatagaagcatcgagaaagtctttggaactcatcaaatctaccaactccatacccttaggcaaagatcttgaaatttcggctacgactttgtctacctcctcaataatctcattcgcattcgaaccggaagtttgcgcgatcatgcagttagagccaggatgtccattcacctctccaatataagtgtaagtacgggaacccagctctatccgagcaacatctttcaatcttaacacttctccactggcaagagacttgattaccaaattttcataatctttctcgtcttcataacgcccccggtatttcaatacatattgaaacgtattttccgactccgcacccaaagtcccggtaggagcctccaaattttgttcatcgagaaccgtcgttatatctgtcgggaccaacccgtattttgccatcttacccggatcgagccaaatacgcaacgaataatcggctcccatcacattcacctcgccgacgccagctatacgagaaagacggggttcaatatttattttcaaatagttgttcaagaaactttcatcgaatgaattatctggactataaagagccaatgctttaatattgctcgtctgtcgtttacgaaccgtaattccactccgcgtaacctcggctggcaaaagcccctgagcactagctatacgattttgtacattgaccatcgccatatcgggatctgtaccctgacgaaaatagattgtaattctcgcagagccagtattcgtagatgatgaaaccatgtacatcatattctccactccattgagagcttcttccaaaggtacgaccacactcttttgcacagtttcggcattagcccctgtgtaactggccgaaacactaaccgtaggaggagctatctccgggaattgttctatgggcaactgggaaagacctatcaatccaataatgagtatcacgacggatataacgcccgccaatatggggcgatctataaatacttttattttcatggcaacacgttattcttgggtcgtctgactttctattatcgttccctctcgtactaatccggctccttcggcaataacgacatctcccgaattaagacccgattctacgatatactctgtaccgttattcaatttaaatacctcgaccggagcagatttcgcctttccttcaacaactttgtaaacgaatacccgattttgtaactcataagtggccgtctgaggaataacgatacaattttttcttaccgtaggaataagaaccgtcccgcttccaccgttacgtaacagtccgtcgggattagaaaaagaggctcgcaaactgattgctccggtactttcatcgacggttccactaatggcatcaatcttaccctgttgtacataagccttaccattgctcaatgtaagttctacgtcaggcatttgcgacatcgccttttgcagagaaccatattgttgaagcaagtcgagaatttgattctccgacatggaaaaataggcatacacttcttgatcgtcagacaccgataccaaaggttcggaaatagtactactcaccaaagcccccacccgataaggaatcatactagcgacaccgtctaccggacttttaacctctgtatatgaaagatcgttacgagcatttgtttcttgtgctttcgcttgggccaaagcagcttctgcttcggctaattcattttttgccgtttgaagatcaaattcagaaacgacctgttctttaaaaagttcggccttgctttcagcagaaagtcgagccgtagccaacttggcttcggcacttttcacattagccacagcagtttcaagagctgctttataaggcacttgatctatgataaaaagtgtttgtcccttatgaacggcatcaccttcgtttatctttatttcggtaataattccgcttacttgcggacgtacttctacaaattggcgtccacgcagtgtcgccgtatatcccgactttaaagtcctatttgtcggttctacggtaattgttttgtacattgctgtgccttctcttcgttgggattctttacatgccgagagcatagacaatacagccatagcaataataaattgtttcatttttactgttttatgtgatgattatttaatttgcgattaatcttcgttaccccgaaaagtaattctcaaatttataaattatattgctaccagataaacatgtattgataaacgactaaaaagtgatgccgaacagcaaatgatgacaattgacaaattcacaagaaagctctacctttgtcataaaagaaatttttcaacgactactctcccttcaatataaaccgacacacaaatgaaaatatgaggcagactcgtatcagtacatacatagacttacttttttgtttggttatactaccagtgatcatcatgttagctcctgtggaaaaatggatcatacaccacacctatttcatgttaacattgatcgtttacttatatgccctttattttacttaccgcaaagccaacataccctcactttttttaagacataaattcggacaagttttttttcttatagcggctctattgataatcacatggggactcagccagatacctattccaaaagacaagttttccacttcttctctggacttgggtatacgacagcacatgcgaacacaaaccgtatggtttttctttctcatcgtcaccggattcagtctcgccatagaactgacattcgaactatttcgccaaattctgtccaaacaagaaatcgaagcagaaaagaataaagcggaattggctctttacaaggcacaaatcaatcctcattttctattcaatacactcaatgcattatatggtttggttttgaccaaatccgataaaacagaatcggcattcattcaattctccaacattctcaaatatatgtatgcacaaactacatcagaaaccattcccgtttgtaacgagatagattatattcgccaatatgtcgatttacaagctctcagactaaataaacatacccacatttctttcgaaacgcaaaccgacgatgaccaagctccaattcctcctatgattcttattacattcgtggaaaacgcttttaaatacggtacatcttccgatatagattgcactgtactcatcagaattatagtgaaaaacggacaactccttttcgaaacagaaaatacggtcatgaaagaaaaaaaggaaaagacccctgctatcggcatcgaaaattgccgcaagcgattagaattgctctatccgggtcgttttaatttaacgactgtccaagaaaaccgacaatataaaatcagactaactattcgactacaatgaaaaaattttcttgtatagccattgacgacgaacctctagctttacttgtcatcactcaattttgtgaacggtttggaaatttggatctttcgacattcagcgaacctcgtattgggttggaagagatcaaacgacacaaacccgatttggttttcctcgatatagaaatgaatagtatcaacggactggatatcgctcacgctctacccagagagtgttgctttatattcaccactgcacacgctcaatacgctctcaacggattcgacctcgatgccgtagatttcctacacaaaccgtttgcttacgaaagatttaaaaaagctgtcgagaaagccattcgcagaatagaaacagaaaaagttcccgagaatatcgttatcaaacaagaatatgccaacgtaacaattcccattaatgacattctatatatcgaagcgatggaaaactatactaaaattttccgggaaaacgggggatacatactgtcccgaacgaacatgaaaacgatccaagaaattttgcccgaagaaaattttctccgcattcaccgttcatatatcgtacctatcgaaaaaatcgaaatgttttccaagaaaaaaataaaacttatcgggaaagaaatatttctccccataggaagactttacgctaatcacatatatgacacacttatctcccgaaattccgggcatatttttccaaactcataagaatacaaggtaaaatacggaacgaggaaatggaaactactatgaaataagcgaatgaaatccgatattcgatatgcacctactaaacgctcattatcttttttataacaaaagcatacattttacaggtattttattttttgtatagaatcattatctttgtacggaaactaattatttatacccaatgaaaaatacatgtgtttttctcactatttgtgttctattcgcaggttgtcagtcgaacaaaaaacaatattacgaaaaacatctcgtttttcccgaaggctcgacaatcgaacaaaaagtcgaaatggcagcacacttgacacctacacctcaacaactagcatggcaacagttggaactgaccgcatttctacacttcggtataaacacctttaccaatcgggaatggggagacgggaaggaagatcccaaactttttaatcccactcaattagatgccgaacaatgggtaaaaacgctgaaagatgccggatttaaaatggcgattctcacagccaaacatcacgacggtttttgtttatggcccactgctacaaccagtcactcggtcgcttcatcaccctggaaagatggaaaaggcgatgtagtcaaagagatgaaagaggcttgcgacaaatatggtctcaaattcggtgtttacctatctccgtgggacagaaatgcatcttgctatggaaactcgcccgaatacaataaatttttcatcgaacaacttaccgagttgctctcaaactacggagagatacacgaagtttggttcgacggtgcttgcggtgaaggtcctaatggtaaaaaacaagaatatgactgggatcagttctataaaaccatacaaaagttacaacccaacgctgtcatggctatcatgggagacgacgtaagatgggtaggaaacgaaaaaggatatgggcgggaaaccgaatggagcgcaacggctcttgttcccggtatatattcccgttcagacagtattaacaccgtattaggtttaaaaaacaaatcggaagacctcggcagtcgagcccttttagaacaagcgaccgaattattttggtacccgtcggaagtcgatgtatcgattcgtccgggctggttctatcatcgggaagaagacgataaggtaaaatcgctttctacattggtggacatctatttcaaatcggtaggatacaattctgttttactgctcaatattcctcccgacacaagggggttgattcatgaaaacgacgccaaacggcttcaagaactggctcaatatataagccatacatttgcaaccgattatggaaaaacttctcacgaaaaaattaccgggaaagagggcgattccttcgagataaatataacggctacgactcccgtgaatacactcttactgcaagaggatatacagaacggacaacgaattgaagcatttaccgtagaggcttcgataaacggagtatggaaaaaaatctccgaaggcacaacaataggatataaacgtctggtgagattcgacgatgttatcgccgacaaattaagagtgactattaatcggacaagagccgatttctccatattacgaaccggaatattctatgcaaaccctattatagaaaaatcagaagaagcacaaaattcggttttcactccccaagagtgtcttatcggagataaagaagcagtagaagctattgacaaaaaaatcgagactgctatttacagcgacggtctttctcctatcctcatcgatctcggaaaaatacgaagcataaaagggttctgttacacaccggtacaagaagagaataccgatgggactattttccactataatttgtatcaaagtaacgacggaaaagaatggaaaggcattatacttaacggtgaattcagcaacataaagaacaatcctattcctcaattcgtcacattcgggaaagtcttggaaacaagatacttgaaattagaacccatcgaagagataaacggaaaccaaaagacctctatcgctgagtttagtgtggtaataccgtaaaaacaaccgatcatatatagaaaaccgcccgattttatattatcgggcggtttttatattacatgaaaatactccaaagctcgttttataccatcgtcatcgacagtagttgtcacataatcggctaccttttttagcgaatctccggcattacccatagcgacaccaatacccgcgactttcaacatattggtatcgtttcctccatcgccaaacgccattacttcgcttatggaaaaaccacaatattttgcaaccgatttcaccccctttcctttatctactcccttagcggttacatcggcaaaagcaggataccaccgactggactcacaagaagataaacaaggcataatctctgcctcttcctcggctgtaataatcggtgtcatctgtataatacgttgttgtaaaagagtactcaaagagatattaccggagatatcgttcaaatcgagaaaccgatggaaaaattcttcgatttcccgagtcgtattatagaccagagctgccgattctcccaccaatatacacgggaatttccgctcatcggaaaatttcatcattgcacaaacatcttctttgggaattgtatggcaagcgattaccttatctccgaccaatatataagcaccattcgtagtaatatatccatcaataaggcttttgatatcatcgagattattgatataagtcaaaggtcgtcccgtagagataaagattttcaatcctttctttttggctttctccaacgattctaccgtagaacgaggaatacgatgagtatgaaaactcacaagcgtaccgtcaatatcgaaaaacagggctttaatcattctttcttttttataatgcaaagatagtcgaaacaaatttacatcataccaacttcctaccatttatcaccatgaaaaaatccgcctaaccaataggcggattttcccaaaaacaacatcaaataacttatataacgaagtaatcactcctcacgactataaatggaatcttttatatcattgatatccacaaatttattcactatggcatagatcgtcaatccagccggactatgtatttgcaatttccctgcgatgtttctcctatgggttatgaccgtatgggcagacaaacacaatttttcagcgatctgcttgttggtcattcctttcacaacgcctataataatctctttttctctctcggtgagcggttcttgtcgttcttctttctcagaagaagtctgcaccatcgattcaaacgtttccttaatctgctctgccgaatcgtacaccgagatgactccatcatacatttttaaaaccgaagcatctgccaaagaatgctgtaaagcaatgcatttcaatgagagaccttcaaggctcttcttaaattgtataatagacgatatacctgccaatcccggatctataatcaatatatctggcctacgccacgacaataatgctgggagctgctgcatatcggcaacttcggccgcttcgatattgagagtcgacagttttttcaacacagtcaataatcccttacggataatcaatgaaggttctgctatgacgacttttaatacaggcttcatttttttctttctatattatattccagcttttgaatgaccggaataaaaagataatcctctatataattatgcgaagctaaatcttgttcgcatgtaaatatatcgaacaacacgctattcagctcattactactcgatgccggataatattttatcaatatatttttcagttcggtcaatttcgcttcaacctgatcgtgtcgttttcgaaatatcgcaatactgtacatatcgggctttacacctgccaataaagagtttacataaggaaaaacagtactctcttcataccgcatgtgtttctgaacctcggctacatactcatcgaaaaaccggagaattgcaatagaaatatctttctctcctccatctatcgcattcaatagattacaacgaatagccggtaatctgaaattcagaaaatagtcgtgagaattatgtaaatactccaataaagccccggtagatataacatttttatagtcatcgacatcaccctcgtctaacaataaattaactacggccaaaaatgtttcggtatgtacgccattttcccgacaaacctccccgatacttttatcgccgaaacccaacgcgatgccgaaacggctcatgactaacaacacagggtaattgtcacaaaccaaatcgctcattcggttattctgattatatgctccgagtttatacatctttttttcttttacttttttgtatcattgaaatacaaatataaccaaaggtgagcgcaaaggcaaacggaaacctcatttccgatttgactctgccgaaccgcatcctatattctacaaatatagcgaaatatcattgtttcgacatgacaaaggaacagcattcccaagagttatacaatcccctttttaggtgaaataagtgctttgccatacctaattgttgttactgtatatcattatgccataaatataaacatttagccccctaaatttgtccacccaaataaaatcgaactatggtaaaaattcttttagacaacgggcacggatacgacacaccaggaaagaggtctcctatatggcccgacggtagtcaactattcgaatgggagtttaaccgcgacatcgtatcccgaatagaaattctattgaaaaaggccggtatctcttgtgtccgattagtacccgaaaaagaagatatttctttatcggaacgctgcaaacgggccaatacgatcgccaaacaaagtgattgtttacttatctctatccatgcgaatgccggtggaggaagcggtggagaagtgtttacctatttaagtagtcacaaaagcaaatcatacgccgaaatatttcaagacctttggaaaaatcattttcccgaacttcgttttcgaggttgtaaagaagagaatttctgtatattaagagaatctgtttgccccgcgcttctcaccgaaaacctttttatggataactacgaagattgcaaaatacttctatcggaatgcggacgagaaaaaatagcccgttggcacgcagaatctattcaaacaattttgaggcgattttatcaactcgggtaaactttttattgcttcgacatgttatagggaaaaaccaatatataacgatatgaaaaaatttgtttttacattattcgccgtggcagctcttatcgcttgccagtcaaacaataaacaaaatcagatgaccggcgaaggcgaagccgtagaaatcgtaggaaccgactcgaccgggctggtagatgtattcgcttatgaaggtacagtaccgacagcttccgggaaaaaagacagtatggactacttggtaatcattacccaaaagatagacagtgtcaatggcgtataccaaatgacaacaacctatataacagccgatgggaaaagcggaaaaaaaataaacagtaaagggaaaaagctatcacataaagggactaaaaaagataaagcagccaaagtttacaagctagtccccgacagcggatcgaatcaaaccgtcaatttgtgggtagaaagcgatacaacggtcgttattcttgacgaccaaatgaataccccagctaaaccagagcattacagattaaaaaccgttaagaataaaaagtaaaatacgatgttttaggcttatagagaagaaggaatgaagtttattatttgtaaaactttattccttcttctctataaatcaaaaaactgaatcaccgctaaatctttgtctaaccacttcatacatcatgacgcccgctgccacagaaacattgagcgaaccaatgttcccaacctgagggatagccaccatctcgtcgcacaaacgtaaattatcggcatcgacccctgtatcctcagcgcccataaccactgctacggggaccgtataatccacccgtgtgtaattcataacagccttctcagaagcagcgaccactttaatcccgctatctttcaaataacgaatagcactatgtatcgagcgctcccgacaaacagggatatgcaacaaagctcccgccgaagtttttaccgcatcggcattcacactgacacttccccgttcgggtaacacaatggcatctacgcctgtacattcacacgttcgagcaatcgctccaaaattacgtacatcggtaattccatcgagaagaacaatgaatggaaccttcccctcctcgaacaaagaagggattatatctcccaaccgctgatacgacaccgccgaaataaaagcgatcactccttgatgatttttgcgggtaatccggttcaatcgttcgaccggtacacgctgaacgaaaaatccacgaccttttatcaaatcgaaaagttctttcgccaaatcgccttgaaggtctttttttaccaaaatcttatctatttcctttccggcttccactgcttctattacagctcggatgccaaaaatcatttcatttttttccatctttcaagtcattacgtttcaataattcacgagcattatccaatgccgcagccgtcaaagaggaaccactcagcatacgagcgatttcctcgatcctctctttttccgataacttaatcaaatgagtggctgtcgatgtttccgtatcacttttataaacccgataatgcgtctgtcccagagaagcgacctgcggcagatgagtgatactgaccacctgcatgcactcggccatctccctcataattccggccatcttatcggcaatctctcccgacacacccgtatcgacctcatcaaaaacaatcgagggtaatgccatagcatgagcaatgagagcttttaacgaaagcatcaatctcgatatttctccaccagaagcgacctcggataccgattgtaacggttgatttttattggcagaaaacaaaaaacgaataatatcacctccattttcgtcatattgctgacgaggagaaatttctatttcgaaccgcagattcggcatccccaaaggtttcaccctttcagttaacgttcgggatatttgatcggcagcttttctccgttctgccgaaagtttgccgacaagctcactcacccttcgctcctgcacctcgatttttctccttagctccgacagttcctcatcgtaattttcgatacgggtcaacttatcggcaaaagaatctctcagagccaacaattcaacggtcgtactcaccctatgcttctgctgcaaagagtagtaaatatccagacgattttcaacccaagacaatcgatcgggatctacactcaggctatcttgggaatgatcgaccgacgaagcaatatctttcaaatcgatataatccgattcaatccgtcccaccaactcatcgatttcggggtataaccgggagagagatttcattttggacaatgctgcattcaggagaggaacaacaccagtctcttcttcatgcaaatatccctgaataaccgccaactcgccctttatttcctcgacatgttgcaacgtttgctgctctacctccaattcttcttgctctccttctttcaattgtgcctcctctaactgggacaactgataccgcaaataatcttcttcttccctacccgatcgattttcatcttgtaatcgagcatattctctcaataattcatgccacgaacgatactcccgttgataatcggacaataaactaaaatttccggccatcgtatcgacgacacgtaactgaaaatgagaatcggccaacaaaagattctgatgctgagaatgtatatcgataagctgttctcctaatgatttcaactgagtcacagaaaccggcgtatcattgataaaagccctcgacttgcccgacggaagaatctctcttctcaaaatacactccttagcatcatagtccagttcgttctcttcaaaaaaagattgcagatgatacgacgatatatcgaaaagaccttctattaccgacttttcatcggtacgtttcaatgatttcaaatcggcacgctgccccagtatcaacgacaatgcacctaatatgatagatttaccggcccccgtttcacctgttatcaccgaaaaacccgagttaaattcaatattgagttcatcgataagcgtataattgcgaatactcaatttcttgatcatagtaactacactttatctttccgtctgacgtattttctcgagtatcgtattctcggtaggatagataccactcaacgtttcatataccgattctttttccgaaaccggagcttttgaatacacatttaccaattcatcgagtttcgcatctttaaataaaggaatgagtaccgacatcggtgcagcttcgtatactttctgtaattgctgtatagcatcggttatttttgcccgtcctttatctacactcaaagccatttcgtccaaaccgcctcgatgatagtcataccataactgtcgaaatccggcagtgctctgctcgataaacgccgataataaagcatgacgattacgggtatcttcgaaagccttccacccggcttccatagaagattgtcccagattcaccacttgatgcgccaattcgtagaatggagttccccccataggcgagaaactgtcgaaatcgactccgagaatcatgtaaacatagaaattgataacagccgtgagattactctctatacttgtctcggaaaatacaagcggttcgtattgctgataattgaactctactttggtatctttgaaattgatgagtatcgtcgtataggaactgttatataccggacgccgcgattgcacttgcaactcgcagacaaaccgattatcggtatattccttaacggtaaaaagcatggagcaatctatccgttcgaccggcgaaatttgggccgtagaccattttctatcgttaatatactcggttatagcttcctttaaagtcgtaaacacctctttattcgtgccctgtatctggtcactattcacctctacacgacaatttaactcctgtgcaactgacaggtaaggaaggaggagaagtaaaaaatacaagacatttcttttcatatcatctctcttattcaagacactcaattgaaggagtttctaccgtttaacgattcaacgatcctccgacacataacggccgataatatccacaatatcagcagcgacctcgatcttgggcttacacggaatctccaccggttctccctgcttgccgataacagttactttattcgtatcacattggaatcctgcacccgcatcccgcaacgaattcaaaacgataaaatcgagattctttttctccatcttcaaacgggcattcatttcctcgtcattggtttcgagagcaaaacccaccaaacactgtccgggtctttttcttcgtcccaactctgccgctatatcgggattcggtcgaagccgaagaatccggtcttcccctgttcgtttcaatttcacatcgcttaccgtttcgggagcataatcagcgacggccgcacacatgatcgctatatccgaccggtcgtactcggatagcacagccctatacatttcttcggcagactcgacatcgatacggtcgatcgatgaatgattcgttttcagactcaccgggccagcaaccaacataacttcggctcccgcctcggcacaagcttctgcaagggcaaatcccattttcccggacgagtagttaccgataaaacgaaccggatcgattttctcgtaagtaggtcccgctgtaatcaagacttttttcccggaaagcggcttagaagtttcaaaaaaacgatcgagtatttcgactatcttctcgggttcttccatacgtcctttgccggtaagatgactggctaactcaccggtagccggttctatgatatgatttccatatgacctcaacatatccaaattacgttgcgtcgaagcatgggcatacatatccaaatccattgccggagccacaaaaacaggagctttacaagacagataagtcgtaacaagcatattatcggctatcccgttggccatcttaccgattgtcgcagccgtggccggtgcaatgagcaaagcatctgcccaaagccccaaatcgacgtggctatgccattcgccggtattggccgtaaaaaactcactaaccacaggcttgccgctcagcgaagacaaggtaaccggcgtaatgaattctttccccgagggagtcattaccacttgtacttcggctccctgctttatcaacagacgcagtaaataggctgctttatacgcggctatactacccgtaatacccaatatgatatgttttcctttcaacatcgttgaagctctattttttacgcaatttagaaacgccggcgtgcgcgagtatatatttcagttataacgtttttcgtattcaacgggaaatcgccctgcatcatccaactgtaataactcggttctaattggaaaacttcctcaacggaacgccctttgtatttcccgaaattaaatacagccacatcgtactcattaagaataatacgccctgcgaaatctacatttctattttgagtcgaaaacgatacccacgagtctatatcgttcgtgagatactttccctcgtactcttctttcatctcctccgtataacggtcgagctgagccttaaacacctcataagtcgcccgcgtatcggccaaagccgaatgagcatcgaccaacggcgctccacaatagaatttgtaagcggcttttaacgtgcgaggctccatgatatgatagatagtttgtacatcgacaaactttcttttcgatatatcgagattgaccccggctctcaacaactcttctataagtagaggaacatcaaaacgattggagttaaatccggcaatatcggctccttcgaataccttcgcaatattccgcgccacatctttgaacaacggcttatcggccaccatttcgtctgtaatatggtgaacggccgtcgaagccggaggaattggcattcccggattgatataaatatctttttcttctgtttttccgttcgggaacacctttacataagccaactctataattcggtcggtcgttatattcgttccggtcgtttccaagtcgaaaaagacaagcggattctttaagtttaaattcatcttctgttattcaattgcttagaatttattaaaaatcgctgagcatcatcggcattaacagcatcaacaaatcttcattttctttattttccagcggtaggatcaccccggcacgagtcggatccgaaagttctacgagtacctcggttgccgatatattattcaagatttctatcaaaaacgaagctttaaatccaatagtcaaatcgtcgccggtataattgcatgccactttttcctctgccgaaatcgagtagtccttattctcggtagatacgaccaactccccgtttttcagttgtaatttagccaatcccaaagcagcatcggcaaatacggatacacgacgcaagacgttgacaaacaaagcgcggtcgataattaaacgattgggattattcgtcggaataaccgagttgtaattgggataattcccctcgataagccggcaattcaaaacaaaatccgaaagtttgaaacatgcatttttcgaatcaaaagccaactctacctttccactctctttcgggagtatagccttcaacaaattggccggttttttcggtagtataaacgatgcccgtacaccgggggcaatgccctgatttttgaaccgaaccagtttgtgtgtatcggaagcgacgaaagaaacgctatcttcaaaaatatccatgaatataccattcataatcggccggagttcgtcctcggcagtagcgaacaacgtgcaacctataccgttaagtaattgttgagcttcgacagaaaacgataccgcagaagaatccatcggcattttggtaggatactcgtcaccattcaccccgataaagttatagcgtccgttctggaagtagaggaatatttccaaattattgtcgtcgatctcaaacgtcaatggttgatcgggcaactctttcaacggttcgagcaatattttcgcattgacagcaaaaacaccctctccctcggcttccattacatcgatagccgtagtcatagtcgtctcctgatccgatgccgtcatagacaatcgagttccttcgagacgaaataaaaagttgtcgagaatagccatcgagtttttcgagttaattactcggctaatagtttgcaaatgcgatagcaacagcgtgctggatacgataaatttcataaatatatctttttatttatttgtttcactacattctctcgatagctatttcactgactatcaagcccaaacaaagcaacctactcggtactttgctcttatatctttaacgaacaaatgtaatgaatttttttttctctaccgactaattcgacagaataaataaagaagttatcaacagacaatgacgacaagattgcctcctcccggtttttcctcgaaacttattcatttctcgaatattatttttatatttggctttacgctcacttattcgttatatttgtagaatataagatgaatcaaaagaatataagtattatttgtatagccttatgcctaattctgataggaggctatatcctccggcaaaattacctgctcgaaaaagcatataaaacggccggtatatatgattatattcccgcagaagaaagtaaaataattcttgaaatagagcaagtatcgcaaatcgactccattacatctcgtttacccatttcacgacgagtatctcctatcctatcgttatggcaagaaatactttcttcggctcgattacccgaaaccagcgctataaccctctctttttcggaaacaggggaagctgcgatctggtactgcatgccccgacagaaacaaaaaaatctaaaaaagatactaccccggctaatatcgaataattaccgccccgtttgcgaaaccaaaggttcgattactgtcaaccactacgctctgcacaacggttcttttctgcatgtgctttttgctccgggcgtcactgctatctctttcgaatcttctttattccgggaagcccaacaaaccgtagacaaattaagccgacgagaacaattcacacacacacgccaaactctcgattcccaagctgcggcaagacttttgcggcaaataccagaaaattcgcaccgcaactcaggtagatggcaaggggaaaatatctatttgttcgaaaagaaagccgacgagaaagtagcaaccttctccaatgactcaaccgcaacagcagctacaaccacatcactctctgaaactacaaaataacggaatgaatcgaccgagccgaatttttcttatccccctcacaactcttgtctgtaccaagatattgattttatctttattttatgaacagtaccctcactaatttcaacgaggcccggataaaaaaaacaaaagaggccggcaatctacgagataaccgacctcttatagtgtccgagatgagattcgaactcacacgagccaacgcccactaccccctcaaagtagcgtgtctaccaattccaccacccggacagtattacagtatctattagaaggtgcccagaacaggactcgaacctgcatgcctctcgacacacgcacctgaaacgtgcgcgtctaccaattccgccacctgggcatataccaccgaaagataccgatggagcgaaaaacgggactcgaacccgcgaccccaaccttggcaaggttgtgctctaccaactgagctattttcgcctttcaaaatttcaatttattctcctggaacgctatccaaatcgagagcgaaaaacgggactcgaacccgcgaccccaaccttggcaaggttgtgctctaccaactgagctattttcgcaattgcgagtgcaaagatagttttacttttcggtttatgcaaatggtttactattttttttcatcgaacaagctcctacaaaacaattagcttttgaatcatagaaagttattatccgatagaatttttcccgataagcgaataaaattctcgtctccactcttcctgttcgaatttaccactactatcgtatgtaaccgtaacggctccttgcttctcgactcctcgcatttgcatacaaaggtggcgagcttctacgacgaccatcaccccctcggtagaaagcgtatcggtaaggctttgacaaatctgtgccgtaagacgctcctgcacctgaaaacgccgggcaaacacttcgaccaaacgagccactttactcaaaccgacaataccgccagacggaatatatccgacatggactttcccgaaaaagggaagtaaatgatgttcacaaaaagaataaaactcaatgtcgcgtactactacaatgcgagatcccgtatgctcaaatactgccgatgatataatttcctgcgccgattgacggtatcctctcgttaattgcatcatcgctttcgccgtacgttcgggagtcttgcgtaatccctcacggtcaggatcatcgcccaacaaagaaataatagctcgatagtgctcggccaattctttacaaatgcggcgttgctcctccgaggccaaaacagactgttcttcctccatcgctcaaagttattctgtaaatccctgatgtatctgtatatgtattttgtcccgaacgacacgcatctcccgtgccatttggggaaactctttctttaattgtatcaacgcatttccagcttcctcataagaacgaaaatcacccactctcaatcgccaaaacggagacgtaaaagtcacgtatgtttccaattcgggaaaagcctgttgaataagtccctctttatataaggcattatttttagccgtacgatagtcattatcggaaaatacttgtatacgaaatcccgaggactgggcataacctttatttccgtcgtactttatcaccccttctgcccgacttacacgcttagccaactgagccggttgtacgaccttgactttaccacccgtctcgggtcgttcgagatattgaacgatcgaggtatccataacggcaatttgagcttgcgccccattcgttaaaccaatcatggacaacagcaaaataaaaaaaagagacttgcgcataaccaacgttttcattcaaaatagtaaggctgcaaaaataagtatttattcttacttttgcagcctttataaagtctattttatcagaatgcagtaataatgcccataaatgaatcggctttcaaagcagcaccaccgataagaccaccatctacatcgggtttagcgaacaactcggctgcattgctcggcttacagcttccaccataaaggatcgaagtattctctgccacttcttttccatacttgtcggcaatggtcttacggataaaagcatgtatttcttgagcttggtcggcagttgcagtctttcctgtaccgatcgcccaaaccggctcataagccaaaatgatttttccgaaatcctcagcagaaaggttgaataaagattcttccacctgagctttcacgacatcgaaatgttttccggcttcacgttcttccaaaacttccccgatacaaaaaataggagtcagtccattagccaaagccaaaagaactttttcttttaagatttcgggagtttcgtgataatatgcacgacgttcggagtgaccgagaataacatattgagcacccgtcgatgccaccatcttggcagaaacctctcctgtataagcgccttccgttttatcggcacaattttcagcacctaccccgatacgtttggtatctatggcattgaccaccgacactaaatgagtaaacggagtagcgatgataacatcgcacttagtagatgcccctgccaaagcggcatctatttccttagccaatgctactccttcttgaagagtagtattcattttccagtttcctgcaacaatgttttttctcataacaaataaatttttattggttaaaactatacattattttcattctattatattattttcattctctttcttctttcgacgatgggcatcccgccactgccgtatgcgtccgattatcatcgccacggttttctcggtcaacaacaaaaagagcatcggcacggcatataacaaaacgataaaccatatccgtctttccggtcgataaatttccggctgaccgtatgtaagcttatccagcggctgaaccaacaaagtctcatcgggcaattgtgaaggagaagtttttcgtaatatcgttccccctttcaataacagcacacacggatttcctctcgcaatagtgcggataaccgttttatccataaaatagaacggatattccgcccctgtattttcttgccaagcctctacaccctgcggggtagaagccgtaacgcaagcaaactcatatccacgctcgacacaataatcataaagctcattaattcggtcgacctcactatcatcggcagtttcaagatctggcgaaagcaatagaacacgatagttctcgtcataaataatatcctcggttatatcggtcgctccacgatagatagtgaaatcctcgattatcggtgttacggattcctgtcccgaaactgtcttttcatacctatctacaaatacccacccctcttcttccgaaggcagattatcgagtaaaaactccttcctctcgccgttcttttcataaatgaacacaaattcacgctccggctcttcgacagctaatgcttccggtatatttacgcctattttataaggccgaaaatcgagatagggctgataatacgtaccaatataaacaaaaaagaagacaaacaacagcgaatacaatccggtgagccattgcacctgctgattatacaaagctctcaaagaggtattccggtaaactaaaaacaatacgataatcaatagcaatacatttttgaaaaatgtagcccagttacttagatgaaccgcatccccgaaacaaccacaatcggatataggattggctattgccaaataaagagtgacaggagtcatcacacaaagaaaaataaagatcagccgaggggtagacttacgataagatccaaacaacagatgtactcctaacacaaactcgatgatagaaagagccaccgaaaaaagcatggcaaaagaagaaaggaaatcgagatgaaacgccgaaaaataatcctgaaacttataaaccgtgccatagggatcgatagccttcacgaaccccgaaaacacaaacgttccgcctacgatcaagcgagatagaaaaacaagccattgaatcaaagaagatttcctattatctttaatcgtcttgttcgccatattctatttttataagaccaaacaatgaatagttaatcatatccatatagttggcatcgaccccttccgagacaagagtcttaccattgttattctctatttgcttagtccgacaaatctttgtcaatatcaaatcggtgtatgaactgatgcgcatacttctccaagcctcgtcgtaatcatgatttttagcatacatcaactcctttgtttccgtcatgtatttgtcatacagatccaaagccctctcgacagttatatcctccgaatcggaatatccgagatgcaattgaattaatcctataataccatagttaacaattccgattagttccgaacggacaccctcatctattttgctttcgcctttcgtctctatacttcttatacgttttgccttaataaagatttggtcggtgaccgactgcggacgcataatccgccatgaagcgccataatctttcagcttcttgacgaataaatccctgcaaatagagataacgtgttcgaactgtgcaatagtatctgccatgataaatgtattttcaaagatagcaaccgactacatgcaaaggtgaaaatatacccgctttacacaaagcccaactacttccgactttcgcatacaaagatacaattttattctaaatacttgtattcaaataacgatcgatatttattccagcatttttatagttcagtaaaaaaatccgtgggattagcgatgaatttttatccgcaacatcaaattttacactaaaaaagcccgactctataaaagtcgggctatataaaggggtcgtatcaaaggatgcgatgaaactccgaaagacaggatttgagagccttcgcccctttgtaatccaccgtgctaagcatacctcgaaaggcgtggcccgccattggaacgaaaagcttgtctcggcatttcataatttttgatgagtttcccaatctactttgatacgaccgggctttctcttgtctttgatacaaagctaaccaaatactttgaataaacaaaatattttcaataaaaaaattaggggtttaccatgaatggcaacccctaattttttatataaaactacaaatccctttgtcttattttactttctcaacgatagctttgaatgcttcgggattgttcattgccaaatcggcaaggactttacgattaatttcgattcctgctttatgcagtgcacccattaacttagaataagacataccttcgagacgtgcagccgcattgatacgttgaatccacaacgcacggaaattacgcttattatttttacggtcacgataagcatacgtcaaacctttttcccaagtatttttggcaacggtccaaacgtttttacgagaaccataataaccgcgggtaagtttaagaatcttttttctttttgctcttgaagcaacgtgatttactgatcttggcatagtttttttctgttttgaatgttagcgctaccgttcaaggtaaacttcaagctaaaaacattcggttaataaaatttgaaactactcttttttgagaaaaattttagaaatcgccgaagcttatttcatacccaacaatgcttttacattgtttacatcaacggtatttaccgttcccatgtgagtaagatttcttttttgcttcttcgttttcttagtcaaaatgtgacttttgaaagcatgttttctcttgatttttcctgttccggtaagggcgaacctctttttggcaccggaattagttttaatctttggcattttactaaattttaattttataattgaatgaatagtttgtcaaatatcctatttattttttcttcgggcttatcatgatgatcatacgcttaccttccagaaccggcatcatctccacttttccatagtcttccaaatcgttcgcgaaacgcaacaagagcacttcaccctgttccttgaacagaatagaacgacccttaaaaaagacataagccttcacttttgctccttcgttcagaaaaccgatggcatgtttcaatttgaaattataatcgtgatcatcggtttgaggtccgaaacgaatctccttaacaacaatcttcgtcgacttagctttctgctctttctgacgttttttctgctgatagagaaacttttgataatctaaaatcttacataccggcggcactgcattaggcgaaatttctatcaagtcaagaccttgttcatcagccatatgtatagcttcttgtatggtatataccccttgctctacattgtcaccgaccaaacgaacttctttcgcccgaatacgttcattgacacgatattggtcttttatatcattcttttttgcaggcataggcttgtttggcctattagactgcggttgcggttgcggttttttatccattcagactaccattctttgagtaattcttctacttctgcatttaaattttcggcaaaggtagcaattttcatcgaacctttatcaccttcaccctgttttcttacagaaacttcaccattttcagcctctttttcaccaacaacgagcaaataagggattcttttcagttcgttatcgcgaatcttccgccctatcttttcattcctgtcatcaacaaatgcccgaatatccttctcggccaattcgctaacaacctgttgtgcatagtcgttaaatttagcgcttataggcagaacagccacttgatcgggagtaagccacaacgggaattttccgcccgtatgctcgatgagaactgcaacaaacctttccatagaaccgaaaggagcccggtgaatcattaccggacgatgtttctggttatcgctaccggtgtattcgagttcgaaacgttccggcaagttgtaatccacttgtatggttcccaattgccaacgccggccgatggcatctttaaccatgaaatcgagtttaggaccatagaatgcagcttcaccatattcgactctggcttttaaccccttctcttcacaagcctcgacaatggcccgctccgctttttcccaattttcatcgctaccgatatacttctcgcgattgttagggtcgcgcaaagagatttgggcttcgaaattatcgaacttcaaagctttgaagataatgaatataatatccattactttcaaaaactcgtctttcaactgatccggacgacagaatatatgcgcatcatcttgggtgaaactacgtacacgagtcaaaccatgcaactcaccactttgttcatatcgataaactgtaccaaactctgcaaaacgaagaggaagatctttataagaccgcggtgtcaccttgtaaatctcacagtgatgcggacagttcataggcttcaacaaatattcttctccttcttccggcgtatgaatgggctggaaagaatctttcccatatttagcataatgccctgatgtcacatacaacatcttatttcctatatgaggagtaatcacctgcaaatacccaaaacgtttttgaactttacgcaacatagcttcaagacgatcccgcagttgtgtccctttcggcaaccaaagaggtaatcccggccccacattggaagaaaaagcaaagagctccatttccttaccaattttacgatggtctcgttttttcgcctcttccatcaaaacaagatactcatcgagtaacttcttcttcgggaacgtgatgccatatacacgaaccaattgtttgcgcttctcatcgcctctccaatatgccccggccaaagaagttatcttcacggccttgataagccccgtattgggcaaatgcggtccccggcacaaatcggtaaacgcaccttgcgtataagtagttatcgtaccgtcttcgagttcgctgataagttcaactttatattcttctccacgtttaccgaatcggtcgagagcatcggccttcgatatttctttccgaacaatcggttctttacggctcgccaattcgagcattttagcctctatcgtaggaaaatcggccgccgtaatagtagcctcccccgggtccacgtcataataaaatccattttcgatagccgggcctataccgaatttaataccgggatacagttcttgtaatgcctcggccaacaagtgtgccgaagaatgccaaaatgcatgttttccctctggatcgtcccacttgaaaagtttaatagcagcatctgcgtttatggaacgagaaagatcccactcctgtccatcgactgtcgccgcaagaacttcctgagccaatcttggacttatactctcggctatttgtaaaggtgtaataccagattcaaattcctttaccgaattatcgggaaacgtaatcttaatcatcatttttctgtccttatctattttcaacgtttttcaaaaaacgcttctattttatacatttaataatagagacacatgactgcgcctctttttccaaggcacaaaaataataattatttcattacccaaacggatatttataaaaatcttttaatcgctcattcgtttcaacaagttatacgcagccacaactcccaactctcccgctttactcaaatctgccgtacctttaaccgtatcgccttgttttaaatagactaaccctcggttataataagcgtctccaaaatcgggacgtaaccgtatcgcctcggtataatcggcaatagcacccctataatcttgctgggaacaacgcagatttccacgattgtaatatacatatataaaccgcggtgcagactctatcaccttctcataatcacgcagcaccatctcatattccattttcaaactctcatttcccactgccggtaatccagacaaagagaaatctttggagtttttcgagcgcacctgttgaaaatctatactctgtacagactccgccgaaagttgatattctatttgtttcgctcttacaacagcccgaaggaaataggctaacgtaaaattttgactcgtcataatagctctattcaaatcgtcaagagcactagaaaaatcctgaacaagcataaaatcgacagctcgaccgaaataggccaatggattagaaggatttatctctataagacgggaataatcatttatggaagagaaatgatagtttacctgatcggatagcagtgccgcctcggcattcgtaagcaataatttcttgctaaacacatgggtatcgttcaactcttcgagttcccttacataataaatattctgacgaacggcatcgggtctttcataataagtaagcacatacattggctgtacggatacttgcacattctgatcttgtacccgtccccgaattttattctcatattccggcttatattcggtatgggcatcggctaccaatatttgattgaacttattaatatttttatcagactcagaccgctcatcggctgcttgtcccgattttttactattattcgaagctactgtattttcatcgatcggttcatactgggtcttcttttgtaaatccatagctagcatgaaatccttttcaccgcctttcatatcgcccattttccgtttcgcctcagagcgagcataaaaacccgcggcaaaatcggggtactgttccaaaactacgttaaaatcagaaatagccttcccataattcccgatcatatcatataacaaagctcgattataaattgcgaaataattgttcggttcagcctttattacttttgtaaagtcggatatagccttattccgttcacctacttgcatacgcaataatccccgattgtagtaggtcatcgtattatcgggatctagtttcaatatataatcataatcggccatagctccctgcaaatcatcttgatgatattttatacgagccctattgaaatagtaagacacttctttgggatcgagcctcaaagcctcgttcatatcggccaaagccgaatcataatcggcatcgtgcaacactttaataatagcccgttgagcatatgctcccgatatgtatttatctatcgaaatagctttatctatatcatcaatcgcttttatcgtatcgcccttctccaaatagaactgggccctactcatataaccgttgtaatagttcggatgcaaagctatgagtttatcgaaacttttttcggcttcgtcatattttttcaactgcacttcggcaatagccttattattcaaaaaagacctatcttcgggggcataacgcaaaccctcggtatagtcgtcgatagcgccttgataatccccaagattctgtcgggcaatcccccgaacttgataggcattgacaataaaaggattacgttcgatacaaagggtacaatcttcttctgcccctttaaaatcatcgaggctcaacttcgcaactcctctataaaaataaggctcggccatatacggctttacctttattacttgattgaaatattgcatcgacagaatatagtcctcaaaataaagtgcattacgtccgatattcatcactctatcggtattaatctgcgccacagataaaaaagaggaaaacgacagcaatagaaatatgatatttgacttgaatataagtttcattaaatgccttaacatgattatcagacaaatgtacgtaaataatgacaaaacaacacaaccctgagagcattttataagatttttctttcccaacacatcgaatgaacattttttacgccaaaatgtcttatataaaaaagaagaaacttttttcgtatctttatacctcaaaattgcacagacatgagcacagaaaaaaaactacaacacatcgttatcgtcggaggcggatttgccggatttttactggccaaacgaattaatcctgaaaagttcagagtgaccttagtcgatagaaaaaattttcatgcctttcctcctctgttttatcaaatagcctcgtcgggacttgaaccggccgccatttgttttcctttcaggaaagagctacgtaaattacgtcacgtccgtttccatatgggagaagctcttgcagtagatactcaaaagcaaattttaacgaccaatacaggaaatataaattatgattatttggtgctcgccacaggcacaaccaataattttttcaatatgcccgaattaagggaacgagtatatactctgaaatctactgccgaggctatccgactaagaaatgaaatactattctgtttagagcgggcctgtacctgcgccgatcccgaatcgcgccgcacgcttctctgcttcacggttgtcggcggaggcccgaccggagtcgaaatagcgggtgctttgggtgaaatgaaaaagtacattctgtctcgagaatatcccgagatcagtccttgcgatatgcgcgtcgttatcgtcgaaggttcagaccgcctattacagaatatgagtacagaagcctctaccaaatctcgacaatacctcgaacaactcgaagtcgaagttattaccggacataccatgaaatcgttcgacgggacttacgtgagttttgacaacggcgataaaataaaatgccataccctcatctggacagcaggtatcaccggcgaacctttgaaaggaattccagaaacgtccatagggaaaggaagacgaatcgtcacagacgaatacaaccgggtcgtcgggtgtgaaaaccttttcgcaatcggcgatatagccctgcttaccgaaaaaaactatcccaaaggtcacccgcaagtagctcaggtagccatacaacaaagcaaattgttagcaaaaaatttgaaccggaacagtttcgaaacgccttttcattataaagataaaggaaacatggcaaccatcggccgtaatcgtgccgtagccgacttgccctatctaaaattatacgggcggccggcttggttcacatggatgggagttcatttggtttccatattaggcatgaaaaataaaattatcacttttttaaactggtgttggtactattttacctataacgccaccttacgattgttgatacgcccgacccgatatccgaaacggaatgaagaataaccatatttaatccgtgttttagaacaattttggtttgtttttcctctaaaaaagtgacttttttcaatctacctttgtcccccgaacaaataggtattaatttatgaaaaaagtcactagcgtatttttgtgctgttttttatttattgcactcaattatgcccaatctggacaagtgatgacattgaaagaatgcatcgaaatgggcatagcgaataatctctctctgcaaaataaaaatctaaatgtccaaaaaagcaaatacgggatctctgaaaacaggttcaaactgttaccggtcatcaatgctttcgccaattttaccaatagtcccgaaccggccgtttcggtaaccgacggaagcaaatatggaactccctataacgtcaccaagacactacgatacaatgccaatggcggtttacaactgcaattaccattatataatcagaccctatatacaagtatcaccatctcggaattagtaaatcgaatagacctattgtcttacgaaaaagccaaagaggatcttatcgtcgaaataggaaaactctatttcttgggacaaacgaccatctgtcaattacaaattatcgaaggaaatatcgcccgtctagattcccttcgcaacatcacacaagcattcttcgataatggaatggctatggacgtagatgtaaaacgtgttgaaataaatctcgaaaatatgagggttcaatatcacaacgcccaagctatgcttaaccagcaactcaaccttctgaaatatacgcttgaccttccttcggaatacgagataactcttaccccgctcaatcccgacataaccgggaatgtgcgtttcaatggtttatcagattcgctatacgaactccaattactggatactcaaacccaattattaaagaaacaaggacgaataatcaatcaaggttacataccttcgctcaatttcaccagccaactggcttattcggcttatacagataaattcaaacatttcttccactctcatatatccaacaaatggtacgaatcattcaacttcggcctgtccttgaaaatacccatcttcgatggtctgagcaaacacaccaaaaaacaacaagccaacgtcgaataccgaaaagctgtactccaacaggaaaatacccgcaaacaactagaaacacagtacaccaactcggtatcggatttgatgaacaatcaacgcaattacgaaaaacaacaaagcaactacaagttggccgaagaagtttacttggttacaaccgataaatacaaagaaggaatagcttccatgaccgagctcctacaagatgagctccgattaaccgaagcccaaaacggctatttgagcgcgcactacaattataaaatagcagaattaaatttgctgaaattaacccaacaactcgatattctcacccaataatcctgtaaaattaataatcagtatatataaatacttttacaattatgaaaaaagaaaatagctctcattataaacggagtaaaaaattaaaagcattgcgtttcggacaatatacattaaatgcaatcggtatcatcgttctatgctacggagtttatgaagcggcttgcctttttctcaattacaaacgctgcgaaaccagcaacgatgcccaaatagaacaatatatatcgccaatcaacatacgcgtaccgggatatgtaaagaaagtttacttcaccgaacaccaattcgtacacaaaggcgacacattacttgttctggacgatagagaataccgtatacgagtatcggaagccgaggcggctttgaaagatgccgaaaacggaattgcaatcttatcttccagtttgacgacgacacaggcgactgcttcggtttatgatgcctctatcgaggaaataaatacacgcataagcaaattgcaaaaagacttgactcgttaccgcaacttattgcaacgtaatgcggctacccccatacaagtggaacaactcgaaaccgagttaacagcaacactcgccaagttagaagctctgaaaaaacagaaagccgcagccacttcgggagtaaacgaagttacaaaccgcaaagcatcggtcgaagccggaatattaagagcccaagcagctttggaaatggctcgattaaatttgtcctatacagtagttaccgccccttgtgacggaacactgggaagacgggccttagaggacggacaatttgtacaaggcggtcaaagtctcacttatatcatacccgatactcaaaaatgggtgattgccaattataaagaaacccaaatagccaatttatacgaaggccaaaaagtaagcatcaaagtcgatgcctttcccgataaagagttttcgggacacatatcggccatatcgggagccacgggttctaaatactccttagtacctaccgataattcagccgggaatttcgtaaaaatacaacaacgtattcctgtaagaatcgagtttgacgaattatcggaagaagacaaccgactcttagcagccggaatgatggttattataaaagctaaattgtaaaaatggctcacacaaaaaattatcctttttacgactgggttccaaaaccactgggaatcatcatactcatcatgctattctgccctattatgttcattaacggggcatataccataaatagtggagagatgtcgtctggtcttggaattatctcggagcacattcaatatgcaagctatgccggagcaatcggcatggtagtattcgcaccatttatgcaacgagtcttggctgtgaggagacccaaaatgatgttaatgacaggcttcattctgttattttggctcagctatatttgtgcaattacagacagttggttactactcatgttatgcagtctcattacgggttttatccgcatggctctcactttgataaatctatttgctctcatactgtatgcatttaagatagaggccagcgacatcatcaccccgggagccgaagccaccgatcccgtagttgccgacaagaacgatcaagccaaaggcctcacacaacctatcatttatctctttttcatgctcttcgcgcaagccggtaattcgttgaccgcatggcttgcctatgaatatgaatggcaatatgtctattactatatgatgggaatgttgatgctctcaatcgtcgttgttctttccaccatgaaatatcagaggcatctgaaaaagctcaacttcaatctccgtcaattcggcgatgtaattgccgcatcattgatgatgatggctggttcattcatactgatttatggtaaaacactcgactggtttgacaactactacatacggctggccgccatattattcctactatccacggctgctctcatttttattgagggaaacttgaaacacccctatctgaaactaggagtattcaaacagaaaaatgttattttcgcttcaataacattcatcatgcttatgatgattaattgcagtgccatgttcgtgagcgtattcaccagcatatccatgaaaatagacaatttccaaaatgccatgttgggaaactattcattggtaggatatgtaataggagccatattgtgcatgattctatcggctttcaaggtacccttcaaatatatcttcgcattcgggttcagtttcatcacagcctacgccatatatatgtatttccaataccaaagcatgggtctttatgaacacatgatatgggccacgatactgcgctcgaccggtatgatgatactctataccatgtgtgccgtattgggtagtatacgcctgcctctcaaatatatgtcgtcttggatttttgtaatgctctttgcccggtcaattatcgggccgaccgtaggaacagcgatttattccaacttgttgaacgaacgtcagcaacattatatggccacactatcgacaggagtagacttgatgaatccagaaatcgcaggcagcttcaatcaaacggtgaaaggcagtcaattcatgcaaggacatagtgccgaaaccgcgactactcttgcgaccatgcaagtatcaggacgcattcaagtacaagccatgttgtcggctctcaaagaaatcacgggctggacaatctttgcaagcatattattcattattatagttctctgtgtccggtacaagcaaccagaatatccgggaatactgaatctcaaagaaaaaggagcttatgtagggaaagaattagcctaatatataacaaataaaaaaatgtcctacttttcgagaatttatttgttatctttgcatataaccaaaacaaatatatataatgaaaaattttctttttaccggattcattattttacttctatccgcagtatcgtgtaaaacgactgaaaaaggaagtatgacacaaactcaaacttccacatcacaaaccaatgagaagaaaaacatttctataaatcgagaagaactcaacgggacatggattataaaaacagccaaaggtaaaaccgttataggcgattcaccagtagaaatcactttcgatctcacaaacggacgtatttacggcaacgacggttgcaacgtaataaacggcactgcatttttcgaaaatgagaatgggttacgtttcgaatcgctcatctcgacgatgaaggcttgccggccagaagttacagatcgtactgtcctcaatgctttgaacgaaacccgctcttataaacgagctgataccaaagagctatctatcaaattctgtgacgaaaaagggaaatctgtgatgacccttgaaaaacgaatggtagatctattaaatggttcttggaaagtcacaactatcgacgggaaaaaaatcaccgaagaaaatccgactatggttatcgatatcccagaggcaaaattatctggatttgcgggctgtaaccgtatgttcggagggatttctttagatggaaccgctttcggaatagcttttacacaagtagcaactacccgcatggcttgtccagacatgaaaacggagcaattattcttatcggcactcggcaaagttaccggattttacatgatagacaactttcatgcagcattatatcaacaaccccaaactccgataatcatcatcgaaaaagttcaataagaaaatacaaagcaacgattacatgtccactgaaaaaagagcaggataaaaaattattcttataaaaataaaaaacgcaggcgttatcaacctgcgttttttatttagaaacccatttaaatagtctataaaccattaaaaaattcgggttataatagaatagccattttttcaaaaaaatgaaatcaagcacctccttttattcaaatctattgcttaattttgagtcgtcttacttgcttacattagggaaaatatgtgtgtgttacaaaataggaagaaggattttaaaccttccgcctaatcatgtgtaacccacaccattctgtgaaagcaagtaagacatcttttgaagaatgtgaattaggcggaggttttaatatatacaactaaaaaacaaaaaagtttatgctgccgccgacagtcaagcaatttttcttcaaattactcatctccatttttgttcacgattacaaaaatgtattaaggcaatatcgacaagcctacacgactcaacgtcaaatggaacaatatttaagagtcatcacacccgaagacttatacgataaagaactcgtacgaatttcagagcgaatgagcgatctacaaaaacttatttatcaactgcgaaaaaagggactaagcgacgaggcaatatctcgcaaactaaatctaccgttacacaaaatacaaaaacatctcgatctcgtagaattagatattctccaaatttcccgatatttcaattaagatataaacaaaaaaggagataatcccaatgggattatctccttttttgtttgctacaatccattaccaaataatcacccgatcttcgggagccatgtacatggcatctccttctttaatatcaaaagccttaaagaaagtttccatattacgcaacgcagcattgacacgccaacggcccaacgagtgagggtcaatcttcgtcaaccggagaatttcggcatctctaatattgccggcccacaatgcagcatacgccagatagaaacgttgatcggcagtaaatccatcgatcggagccggctccacaccatcgaaagtattgtgcaatgcagtgtaagcaatgcgtaaacctccatggtcagcaatattctcacctaatgtaaaatgaccattggcatgcactgtatcgagcacaacaatgttatcatattgcgaagccaaaatttcagctcgtttagtaaattgctcggcatcggcagaagtccaccaatcattaagattaccatctttatcgaactgtcgcccttgatcatcgaatccgtgagtcatttcatgtcctataacgacaccgatagccccgtaattaacggcatcatcggcatcaaaattaaagaatggaggctgcaaaattccggcagggaaacaaatttcgttagagctcggattataataagcattaacggtttgaggactcatataccacttggtcttatccacaggtttcccttcatctttcagagaatataaagtttcaaattcggctgcacgacgaatattagcataatagctatctttcggattcaccgtcaaaccagtataatcgcgccatttatcgggataaccgatctttacataaaagttgtttagtttctcatgagccttcgctttggtttcatcgctcatccattcaaggctgtctatatgttgtcccagtgcggtctgcaaattcgcaacaagttgtaccatacgctcttttgcctcaggagggaaatatttagcaacatacatttcgcccactgcctccgacaagagactgttagggacatcgagagcacgtttccaacgaggttcgatttgttctttccccgataaagttttcgaatagaagtcgaaatgagcatttacaaagtcatcgctcaaatagggagctgcgccatcgatacagttgaacgccagataatcgcgaatctcttgctcgctcaatgtttccagcaaattatttacagctttcaatgtacgcggctgaccgatgtttatctttctcaagctgtctaaacccaccgtattaaaatagatatcccaatccagaccgccgaattgtcttttcaattcatcgattgtcataacattataacccgcctgagggtctcgcaactcttcgcgagtaaaagcggccttagcgatttcagtctccaccttcaatacggtagcagcagcttgcgctgcggactcggcactgtatcccgacaatgtaaatattttctgaatatagttgcgataactatcccgtatcttgctattggcttcatcgtcggctatatagtaatcacggtcacccatattcataccagcctgataccaacctgcgatattcatcgtactattcttagcatcggcatccacgtatatggcaaaaaatggggcagatgtggtacgatgcatctctcctatcatggcacttatcgcctctttaccggaaagtgattgtatacgactcaattcttccgcaataggagaagctccctcctcattcaatcgcacactatccaatcccatattgtacaaatcgccaattttttgagcgatgctacccggttcagccttttgtttacctaattcttcgaataacaatcgaatttgttctcggttattttcacgtaattggtcgaaagatccgaaacgagcatactcaggcttcaacggatttttcttcatccagccgccacacgcataatcataaaaatcatcaccacaagctaccgtcgtatcgagattggaaagatcgatacccggagtctttacggtcgatttgcttgtacaaccagtagcaagcaaagcagcagcaaacaataaaatcattactcttttcattttactttcatttttatatgtttcattcactttgtagaatatagaatgcgtttcctcaaagattctaatcgaacttagctttttgcattcgacttttgctatatttatttctgtaatttatccaatacttcggaggcctcggaccatttccacatcacatcatcgagttgcttcttcaactgtccatgtagttcgtataacgaagtatccgccgcaccatcgggcgttgccaacttttcctccacctcggctattcgtttctccaaaccagcaatctccgattcaatatctgcaaccaccttttcggcctttctcaaacgacgggcaaactctttttgctctccatatgacaacttaggatcctccgatttggccggggaagcagaatctttcgaaatatttccgtccttctctgttttcgaaactgtggctcgttgttcaagctctcgcaaagaatccagcttacgactttccagaaaatcataaattccgcccaaatgctctcgcacctgtcctccaccgaactcatatactttcgaaaccaaaccatcgagaaattcccggtcgtgggaaacaagaattaccgtcccgttaaaatcacgaatcgcttgtttcaacacatctttggtacgcatatccagatggttagtcggctcatcgagaataagcaaattgacaggttcgagcaatagacgtatcattgccaatcgggtcttctcccctcccgacaaaacttttactttcttgtccgaagcctctcccccaaacatgaaagcaccgagtatatctcgtatttttgtacgaatatcccctaccgcaacccgatcgatcgtatcgaaaaccgtaatagattcgtcgagcaagctcgcttgattttgagcaaaatacccgatctttacattatgtcctatcttcaaagttcctgtatagggaatttcgcccatgatacattttaccaaagtcgattttccttcaccgtttttcccgacaaaagcgactttttcgcctcgtttaatcgtaaacgtggcattcgaaaaaaccacatgactgccataattctttcctactccttcggcgataataggataatcgcccgaacgaggcgccggtgggaattttagattcaaccgggaggtatctacttcgtccacttctactcgttcgagtttggctagttgcttgatacgcgactgtacctgcaccgacttcgttgccttataacgaaaacgctcgatgaaagcctcggtatcctgtatctgtttctgctggttctcataagctctcatctgctgttcgagacgctcttgccggagaacaacataacgagaataattgacttgatagtcataaatgcgccccaaagagatttcaatcgtccgtgttgtcacattatcgataaacgcccggtcgtgagaaaccaatacgaccgcattggcgcgagtcgataaaaaactttcgagccattgtatagactctatatccaaatggttggtgggctcatcaagtaaaagcacatcgggacgctgtaacaacaacttcgccaattcgatacgcatacgccaccctccgctgaactccgacgtatcccgtccgaagtcctctcgtgtaaatccaagccctattaaagttttctctatctctgcctgataattggatgccccgataagagccaattgctcattagcattggaaacccgctctatcaactcctgataatattccgactcataatcggtacgctcggacaattcagtattcatgcgctctatacgcgactgtaattcgaatatatgagaaaaagcctgttccgcctcttccattaccgtacgagtatcggatagattcatctgctggggaagataccccaccgtaaggtctttcggcatattcacactgcccgatgtcggagcctgcaacccggctatgattttcaacatagtcgatttccccgcaccatttttccccaccaatgcaatgcgatcctttttattaattacataagtaatattgtcaaatagtgtatttcctccaaaagcgaccgaaagtccttctatcgatatcatatcttttatattacagtctgcaaagataatgtatggtaaatacagaacaaaatttatttgcttcccatttagtcataaactattcagaatcctataccacagagtgaatatttgcagtctccatttcaaaatccgaataaaaagcgtaaacttgtagtcataaattttacattacaatatgacaccctttctatatcgcatagcccaagccttttacaaaaagtacggtaacgaaatctctcgacttgcatttgtttttcccaaccggcgaagcggcattttttttcaaaaatatttggccgaagtttccgggaaaccgatcttctcgcccaaagtaaccacgataaacgacctaatggccgagctatcgccctataccttaatagaccgaatcagcctacttgtaacgttgtataaaaaatacatcgaattgagaaagagcgatgagacattcgacaatttcgtcttttggggagacatgctgttaggtgatttcgacgatgtggataaatacatggtcgatgctcggcaattatttaccaatatacacgatctgaaagagatagacgaattttatctgaccgaagagcaaatagaaatcgtcaaacgtttctgggggcatctgttttttcctaccaccgaaagcgataataaacagcaattcattcaactgtggcaaattcttttcgatctttataccggattacgagatgagctatcctctcgaaacaaagcctatgaaggcatggtattccgagacgtcgccgaacggagtaaacggaaagaagctctcgacctaccttatacacaagtggtattcatcggattcaacgctatcaccgaagccgaaaaaatattcatggaatatttacgcgacatcggcataggagatttctattgggattattacgctcccaccttgcaggattcatacaacaaagcggcattctttcttaacgataataaacgcagattcccctcaaaaatcgagatcgacgagcatatcgaacaaacgcctcagatcgaattaatatcgataccgtcggctgtcgggcaggcgaaacaagcgacagatatacttcaaagccttatcgacaataatcatttatctcccgaaaaggccatcaatacagccatcgttctccccgacgaagagttgttgcttcctatgctatactccattccaccggaaatctctacggtaaacatcactatgggatatacgttgcaacacaccactgtcgcagcactcatggaatcgatataccaaatgcagcgccgcgtccgggtctcaaaaggagagccgagattctatcatctcgatgtaaaacaattattgggacaccggttcatagcgtctcgaataggcgaaaaagcctatcaaataacgaatttcatcaacgaaaacaatcgcacattcgtctctccgaaagaattagggaatcatcgactgataaaacttctgtttcttataccccgtacaacagatgaagcggcagcctatctgatagaattgctcgaatatttgcaacaaggagaaaataggagcgattcatcagaagccggcgacgaagaaacacctgtgggattctcggcgatagaactggaatttatgtatcactactacattaccgtcaaacggttacgtgatgttatcgccgagcaagacatagagatgaccgtagaaacattctttcggctattggggaaaatggccgcatcgatttccataccgtttcaaggggagcctttatcgggattacaaatcatgggcgtactcgaaactcgtgcgctcgatttcgataatcttattatcctttccatgaatgaaggggtattccccgttaagaaaatagccgccacattcattccctacaatttaagaaaaggattcggcatggctacgacagagcatcaagacagtatttacgcctactacttttaccgcatgataagccgggctaaacgggtattcttattatacgacagtcgcaccgacggactcaaaagcggagaagtgagccgatatatataccaactgaaataccattaccgcatacccatacaggaaatacagatcaattgcgacatagcgaccttctctccgataacaatctccatcgataaacggaaatatggcatagaaaaaaaattagccgatttcatgcaaggaggaaatagcgcattatcggccagtgcaataaatcgttatttgaactgtcctttacaattttatctgcaatacatcgaaaaaatagaacaaaccgacgaagtcgcagaaagcgtcgacagcagtactttcggtagcatttatcacggtatgatgcaaaaaatttataaccgtatcaaaggcgaaaaagaaaaaataactgtcaccgccgaccacatcgacgccatacgcaaagacaaaggcttgctcaaccggtatctcgaagaatgttttgccaaagagtattacaaagccccacatagccccgaaccgctaaccgggtatgattacctgaccggggaaatcattcttaaactgattgacaaaactctggaaaaagaccgtgcccttacgcctttttcctatgtagcctccgaacttcccatacataaaaacatatcgatcgggaacaaccgatccatacagttgaaaggctttatcgaccgggtagacgaacataacggacttattcgtatcgtcgattataaaaccggacgcgaaagactcgatttcaaatcggtaacagaacttttctacccttctgaaaaagatcgtaaaaaagcaatcatgcaggtgttattttactgcaagttgtacaaactatacaaaacccctatacaacccttacagccgtctatttatattgtccgtaacttattcgataaattcgaatccttcttgaaatacgacaaagagcctctcaccgactttaaccttgtagaaaaagaattcgacctataccttactcgttgtttagaagatatattcgacctcgacaaaccattttcacaaaccactgttgaatcgcattgtaaatattgcgatttcaaacagttatgcaaacgataactcgaacaaatgaaaagcgaataaatttttctacataagctaatgttctttctccaagaaacatggtatcgcccaatttattttaacttcgcccttatacggcttaaacttacaggagtaattcccaaatacgaggcaagacattctaagggaattctttgtaacaaatcgggagtacgctccaacaaaactctataacgttcggaagccgtcgtgaataacagtggaattagtttttcctctgctcgcaaaaattccaattcggcgagttttctcccccaattcgctatatcgatgtcttcctcaaacaagcgatacaaatcgctcctctttaagcaatacaaaagagaatcttccataagctctatggtttcgtatccagcctcattctttacataacttttcaatgacatgatagtcgccccttctttcccgatccaaaacgttatatctttaccttcgtgcgaaacataggccctcacaattcctctttttataaagaatatatccgactcgattttccctgcctccaataggagatgccccttagggtgtccgagttccaaagaacaagataacaccctatccatcgatttctccgatatcggatatatgctgttgattatgtctcgtaaatccataaaacacgactcattccaagtatattaaatacctctcaaaaaatcttcgagcgactctttccccaaattcaacttttgtctcaaacgataacgatttttcttaacgctctcaggttgtaaagagagcatttgggctatatgtttattttccataccggtacggatatatgcacataaacgaagctccccttcggtaatagatggacacaaagtcttcaaccgaacaaagaaatcgggatgtacctttacaaattgcattttaaagaaatcccattcatcgtcggtccccaagtgcattcttatattgttactaatttgcaaagccgtgttcgattgaatatttccggcatctttttctttttccaattcatcgacaagagatttcaatacttggttcttctccatgatgatcaacgaattggaggcaagctccctatctttgtactccaattccactttgaaacaattattctgcaacatctcattctccaaccgagtcaccaattctttattttccaactctttcaattgtttctttatcttctcctccctactctttttccaaaatatataacaaaccaatgcggcaatacaaagtatgaatgcacaaacgacaagaatcaaaacgaaccggaacctgcctctttcttccgcctgctgcaattcgagttcctgtttctctatggccgcccggctttccatacgtctaatttcagccaaactgtttacttggtccaacgaatctttatattgttcatacctgttcaaataaacataagcactgtcctcctgctgtatggcagcaaaacattccgacatattctttatgacaggaacgatgaggtcgatattccgaatattcactctacggcatgcctttctataataatacaaagcactatcctgtctatgattattttggtaaaaacgccccataaaacactccgactgaatcaacagtcttttattcgcaaattcggtagacaatcgatacgcttctgaaacatattttttactcagaggtacatcatgttcagtcaacaataacaaagtattgatatagaaagacgtatcttcaacacaaacaggattttccaacagtttataaagaattttttcggcctgcacctcttcattcatcgaatataaaacattcgaaatattcaactggttttttgcccgataaaccggcttattcagtttcttataataagaatctgctttctgcaaatactccaacgccttaggataatctttcaggcgactcagtatgtttcccatatcgatataagcatgagccaacatgaacagattgttcgtccgggcataatactccgatattttctttaaattcttataagcaacatgcggctgatttttatgcataattgtccataaatgaaaaacacgcatataatcataaacataacgtatggaatctacctgctgataggcctcatcaattaaatgaattgtagaatcggaattgttctttttaagctgcgaccttgcatcccaaaatttagctcgccacaggtacaccgtttctttatggtgagctcgggctatggtatataattcctgtatcaacgaatcccgataataaatactatcggtagatataaattccaattcaagcacatctgcaatcgaatcgaatgtattatcgataggcttccaatacgtccctataacctcacgcccccaaaagttaaaggaatataaccataaacaaacgaataaaaaacctcttttcatgatacaaatatacgaaaaatgccatctgtccaccgattgtccattcttttttttcgagaaaagcagcatattagtttacatttgtatattaaaactaaaaaatagtggttaatatgagaaaagaaaaactttttcatttattagtattattaggatttaccttattatccatgaccatctctgcccaaaccgacagtcgtgatgtttacggttggctgagatatgacgattacaaccaagacgaatacggtatttgtaaattcaaaaccgatgcggccgatgacattcaacccgtatggccttacgaccaagcaagagtagcctgtgcaggtgcattcgccgaaggattctattatgtttatctatatgagaccgacggttataatgccaccccttactcattcaatcgcatagatctttccaccggagagtccacacaggtcgcagattatagaggtatgccatttttatttcaggatatgacatacgactattcgacccaaaccatgtatgccatcgggtatgatgaaagcgtctatacaacgctgctattgaaagtaaatctgaccaccggagaaacgaccattgcaggagagataggcgaaagcaaatatgtagccttagcctgttcttatgaaggtcaattatatgccatcgatgtagactatggagatttatggagtatcgataaatttacgggggcagccacagacatcggctataccggtgaacgggtaagcgaggatcttcaatctatggagttcgatcacgaaacaaatactctttattgggccggatataatttttggggaacgatagatacctctacgggagcagcagaagggattagtaaattagggaactatgcacaagtcgtaggactttatatacccttcaaaaaaacgaatcctaatgctcctgccgaaatctcggatttacaaatcacaccgggagctaatggagaattatctgccgaattgagttggacaaatccatctttaactttcggagggaataaactaaccaacttaacaaagatagaaatttatagaaacgaacaactcgttcacgaaatcacaaacccggcaatcggagaaaaaagtaattggcaagataccggaatacaacaaaatggatcggttgtatatcgaattaccgcaatcaataacgagggaacaagcagcaccacggcacaagcaatattcataggacgtgacgtaccggcagctccttcccaactatcattgattgtcctcgatgaaaacagagcaaagataacatggtctactccacaaaccggtgcaaacggaggttggatagatgcctctgctctcacctataaaattactcgtctaccggattctatcgttgtagccgaaactacgaccggtaatgagtatatagataattccattacaaaactaaatatctattcttatcagatacaagccattacccccgatggcgcaggtccaaccgcaaccacggacaggcttgtcatgggtccggcattaactgtaccttaccgatgtaattttgcgacagacgaccaattcgctctctggaatgtgatcgacgccaataatgacgaatacacatggaaacgggaaacgactcttgcagccgcttattattactataatgaagatggagaaaccgggggagacgattggttggtttcttcgccgattcatttggaaaaaaacaaaatctatcgcttaaagtttaaattacaatcctatgacgtaggttatcccgaaaaggtcgccgtacatctgggtacaggagcttctgtcgctgaacagacgaccttacttggcgactatgaagtcgaaagcaatacattcgtcgaatataaagtcattctccccgaaaggttggaatcaggaaattatcacatttctttccattgccactctgagccgtacatgtttatcctttatgtaaccgacgttttattagaagaagtcagcgaaggggtcttatcgggtgtcgtaacaaacggacaaacacctttggagggtgtggaagtaaccataaaagactctgaaactaaatgcactaccgatgaaaaaggtttctatgaatttaaagaactggaagcaggaaactatacattgacgttcaataaaacaggttaccgctatatcgaacagagcgatataatcgtcgaaatgggagatactgcgaaaataaatacgacgttggaggaactgcctacttattccgtaagcggtaaaatagtaaacagtaaaaacgaacctatcagtcatgcgaaagtatcgataaccggatataccgattactcgacagaatccggttccgacggtacatttatattcccacaagtatatcaatccaacctatacgcactaaccatcgaacgttacgggttaagcaacgatacactgactctgaacgtagaaaatagtaatatcgttttagatgacatcatactaaaagacaagcctcttccaccctattcattgcaagctgaaattcagggagaacaggtaaaattagagtggaaagaacctatggatacccgtttattccgtcacgataacgggatacatggtggaagactcggaacaacaggatcgacagtaaaaagcgtatatggttcggtattcagaacaccgaccaagctaaccggaatgacatggttcacagaaaactaccttaccacacatcacacggtcaatatttttgtgttcgatttagataccgaaggagagcccacttcgaccatcttatactctcaaacgaatgttcccaacaaagatatggaatggagcagttttgaattcccggaaccgataaatgcaccgaatggatacatgttggcactcagctatgaaggccacgtcggattaggactcgatacaggcgaaggtcccgactatccgtttaccgaaaaaacaaattgtttctcagaggattacacgaccggaaagttcacttatacggaagaacacgatatcaaacgttctctgatgattcgcggtatcggtattctgatcggtgaagacgaattaccgcctgccacgacagataaaaaataccaagtatggagactaaccgccgaacagaaagacactccggaacaatgggaattattaaccgccgaaacagtagaggcatattcttataccgatacaaattggagttccttgaaacaaggattttatcattatgcagtcaaaaccgtttacaataacggagaaatcgtttcgccggcagcattcacgcaagcgttaacgaaagatatgtacactcgggtcaccctcaacataaaaacgagcactcctaccaacgaagcgaaaggagcccaagtagttctgacaaatattgatggaaacagcgaacatatatacaccggtacaaccgatgcttcgggtaaaatcgtcttctccaatatatggaaagggacttacgatataaacatttcattaaaaggtttcaataactacacagccgaatccgaagacttttccactgaaaacagttacgaaaaatctagctacgtattacaagaatatatcgtcaatccgttcaatctcgaagtggtgaaaaccgacaatgaacaggagcgcatgttcaaatggaacgtgtcggaacatcttttcgacgattttgaaactcataccgattttgtcatcaactcggcaggaaacataggctggacttatatcgacggtgacggtcaagaaacttatggaatcgacgacgtagactacatcaatgcgactcttccgaaagcctatatgatctttaacccatacgctaccgaccccaacatcgcacttttcgattccaatatcagaccacgtagcggagaaaaatacttagcttcattccctgcacgtccgggtgcgaacaatgactttatcatttctcccgaactgaacttcaatcgagactttatattgaagttttatgccaagagttatacggaagattatggtaaagagttgatgaatgtaggatattcggtcaccggtaatgacgcaaccgatttcatctggctgaacggagaaaacccgatagaagttccgatgggaaattggacggaatataaatataccattcctgccgaagccaaatatataacgattaactgcgtctccaataatattttcgtctttatggtcgacgatatattcatcggagtagagttaccagaaggagtcgatttaaacaacatgaaagaaaatatctctttcgaagtctatttagatggtgaaaaaatcaacacgacccaacagagcaattatctgttctccggtctgaataaaggtaaacataaagcaggtgtgaaagctgtcttttcttcggtaacgacccctatgacagaaatagagtttgatgtggaagaaggcagcggaatagaagaaaaccaattaaacggcagaacgattcaccccaatccggcaaaagagacagtaacagtttccggtgaatatgactacttgtccatattcgatatatccgggaatgaaaagtctcgttatttttacggggaaacaataagcgtacggaacctgccatcgggtatctacatcgtcagaatcgtttccggcagccaaaccgaggtgaccaaattggtcgtgactaaataataattttctaattatatttcgaagaatcccgatacatcgttatgtatcgggatttttttactacgttcgatatcattcatcattaatcgtcaaaaacttatttcacttcttatcaaatgtaaagtaaaaataggcgggactagaataactttgcaccattttcaaattaacctctcgattttatgacgaactggattattttgattgtagcaggattcttcgaatcgtgtttcgctttttgcttaggaaaaatgaaaggagttgtaggcctcgaatattacttttggggcataggttttctagcttgtctggctctaagtatgatacttctggccaaagccatacagacaattcctatcggcacggcctaccctgtatggacaggaatcggcgctgtcggtacggtgatagtaggcatcgtctttttccatgaacctgcagctttcggtcgactgtttttcgttacgacattaattgcatcaatcataggtctgaaaatggtttaattagaaataaatagtaatatatgttcaaagagataatggctgccaccgaacacaacaaccttaaaccgatacagacaaaaaataaatgagaaataaactacaaccgtgttctttactattctccgagctgtcgttttatccactccatcaccacagccacggcataatgttgttcctcatcggtcaattctcgaccggccggtatacgatgccatttttcgaaacaacctcggcaacaacacccggtggcatgttgagctataaacacgggatgcccgcgcatgggagtttgtttaccatcgttgggaatcacggccggagccaatcgtttacgaataaaatcggcggcatgacgggcaatcgtatcctctcctttttctttcagatacactatttccttagtagttaaacgaaatttgctgcggaaccgggactgtgaaagtcgttcgaaaaggtctccccaatcataggtattgggtaaagcctctgttttttcgacagaagtcgattcagggaataattcaccgcagaaaaaatcgcttcctttaaccttcttcatgagacaaaaacaacagaggttgacctacaaaatcatctccattcctactttttgaggttttaaaccacatttttcataaaacgtcatagccgattcgttgcaacaccacacatttaaagtgacattgtaacacccttgttccttagccaaccgaaccaccgcatcataaatcactttacccacaccattgccccgttggccttcatcgacacacaaatcgtcgatatacagagtctttatatccgtgaggatatgactatcccgatgttgctgaaaaatacaaaacgcatatcccaagactctatctttatcatctgccgctaccaaaaccggggtatcgcaatcggacataatttttcttaattcttcatctgtatattttttcttcccggatttaaataaatcggggcgtcctcgatgatgaatactattcacttgaaccaaaagtttgtttatctgctctatatccttttcttctgcaaaccttattatcattgtgcttatactctttttcattacgaagatactgattcttgaatataaagagaaatgtcaccacccccaaaaatctatctttccccaatctcacggcacatatcactctgcggaacaatcatcgaagaatcaacaaaaaaggatatatttcactaataatcaaaacaatacaaataaaaattcataaatatcaatcaaaataaatacccaagagtaaagtataatatatagattttatcgaaaaacgataattatttattgattttctttttgaattaaaattttatatgtatgtttgcaccatattaagaatgaaagataaaccagttacaatcctttttattcacaaaaaatctatctttgtaaaaatagaatgaaacaaacaataaataaaaacaaggaacaatgaaaaaatttttcaccacgacattcgcctgcgtattgggcgtaatgattgcaggaatattattaaccttattgtccatcgcagcattaaccggaatggcggtttcgacagaaaccgaatacacagcgaaaccaaacactatcatgaaattggatttaggtatcgttaccgaccgtagccaagaagatttcatgagtgttttgtttgggaaccaacaaaaaacagacggtcttgacaacatcattaaagctataaaaacagccaagacaaacccaaacattgccggcatatacatcgatgctaacggctcttccctcggtgttgcctctctcgaccgcatacaccgggctctgaaagatttcaaagagagcgataaattcatctatgcttatgccgacgactacacacaacgcgaatatctactgagtgcggtagccgacagtgtcgttctaaatccggtaggagctatcgatttcagagggctggcaagtcaaataatgtttgtaaaagggctttacgataaattgggtatcgaagtccaagtcctaaaagtaggaacatataaatcggcggtagaaccttatatcaacacgcaaatgagtgaagcgaaccgcgagcagacgatggcctacatgactcctatttggaatcatcttctcgaacaactttcgcaagaccgagacatatcggtggaccagctgaacaatctggccgacactctattggtgacagtcgatgccaaagaattaattgccaaaggattggtcgatacgttaatgtaccgtcctcaaatgaacgaatttctgaaagccaaagtgggaatagataaagacgatgatttaatcttcgcatcaatcaacgaagtagcatcgatcaagcaagccccaaataaagccaaagacgaaattgctatcgtctatgccgagggaggcatcgatatgggtgaaaccaacggagtgaacaccgccaagctggtcgaagatttaaccaaaatacaaaacgataaaaacgtaaaagcagttgttctccgagttaattctccgggtggaagtgcttatggttcggaacaagtatgggctgctatcgaagctattaaagctgccggaaaaccagtagccgtatcgatgggcgatgtcgctgcatcgggtggatattacatctcttgcaatgccgaccgtatctttgcaaatcccactacattgacaggctcgatcggcatttatggcctaatccctaactataaaggtttattgactgggaaattaggccttacattcgacggcgtacaaaccaataaatatggtaatttcccctcggtaagccgggctatgacaaccgatgaacatcggcaaatgcaacaatacatagaacgaggctacgaattattcaccactcgttgcgccgaaggccgtggcatgagtatcgaggcgatcaaaaaaatcgccgaaggtcgtgtatgggacggtgcaacagccctcgaaataggtctggtcgatgaattgggagatttggatgccgctatcgaatgggttgctcaaaaagccaaactcgacaaatataaaacaagtgcttatccaaaacaaaaaacggctatggaacaattaatggacgagctgggaatgaatgttcgctcaaaaatagccgcttcttatttaggtgaaaattataaatatttcaaagcgttggagcaatgtcaaaatatagatcccgtacaataccgtatggaagacattgagctctactaagtcttatgtacggaaaatcggttaagataaaccattggctcattccgatcagttggctatatggactcggagtagagattagaaacaaactcttcgactggggcattctcccggccgaagagtttgacatacccgtcatatcagtaggcaaccttgccgtaggagggacaggcaaaacgcctcacatcgaatacttgatcgaattactcggtcataaatatcatattgccgtactcagcagaggatacaaacggaaaagtagaggattcatattggccgatgacaagtctaccgcccgtgaaataggagacgaaccttaccagataaaaagaaaataccccaatataaccgtcgcggtagatgccaatcgccgtcgaggtatcaaacaattaaaaaaacaaatacccgacatcgatgtgattctactcgacgatgctttccaacatcgctatgttacgccgttgtcctcgatagtactgaccgactacaatagagctttacacctcgacaaactattaccggcgggacgattacgtgaatctcgacacgaattgtcgagagccaatatggtcatcgtaaccaagtgtccaatagatatgaaacctattgaatataatattatatctcgttggttacacctgtttccctaccaaaatctatatttctccactctttcttacggtcatctgcaagcagtattccccgatactgccataggagaaatatcgctaaaagatatatcgagaaaagacggattgatggtagtaaccggaatcgccaacccggctcccatgctgcaatacatctctcattttcacgacctgcgagaaaagctactttatcccgatcatcataactttacttcgaacgatctgaacgatataacgacacggtttttggccttgaaaggagagaaaaaatacatcatcaccacagaaaaagatgcagcgagactacgatcggtcccattcgatgacgcaataaaaaaagcgctctattttcttccgatacatgttcgtttcatgcaacataccggaacatcattcgatgaaaaaatttcagacataatctataagaaccgcagatcgaaacaagtgaaaaaataacttcgaagccgcattgagttttttatgccagattaagatcatcgcacaaaatatctatctacaaaaattaaaacagtttcttaaaactccacggtaattcccaatgtcggcagaatcactccgctttgttgggcgatgtatttcatgcgataccgttctgtcccgtcattatccacatatttttcgcccgtgcttatcaataccggaggattatcgtatttaaaattcagcacattctgtaaatctacataaaatcccaacatcacacctttgaaataaaacgacttatccactctgatatcagcctcatagaaagttttcaaacgtcctgtattataccggtcataatcataataaggtctagccgtggcatcccacgccggaacaagagacgaagtatactcatcataaggagtatatggagcccctcccatcaacctgaatttcaatcctatatcccagtttttaggtaacttatacgtcccggacaaagtaaaaagatgacgataatcccatgccgacggtatataaatcccggttgccggatcctcgaactgactacgataccatgtataagaagccaatgccgtaaaccgtcccataccaaaccaacggagcatcacttccaaaccataggctctgcctcgcgcagtcgagcttgccgcctcattacccgacacaccgtagtccgtccccttacaggccaatggaatactatcccttagagacaacggtgaatgagtatattttttataaaacccttcaaccgtcaaacgtgcccacttgttgatataatactccactccaacgacagcttggtcggaacaaatatatttcaatctcgatttatttatcaaaacattatcctcttgataccccattgtcgtatatgccggtagctgataaaaccgacctatgctaccattcaaaaagaaattccctatcaaattatacgaaagcgacaaccggggagaaaattgcttgaaaggattatccgtcaaagaagaataattacaagcatcgagacgaaatccaaatgaagccgaaaaacgatcgtcggccgacttatatccagaagttgcgaagataccccatttgaacaaacccaaatccgttttatatcttatttccttagggatatcggtaaatgcacgttgaaacgtattattcctataaacggcataatcgacattaaatccagcggtcaaatcaaacagccccaccaatgacctgttctcgaacctcaaatgattttcaatctcgtccgatttaagcctcaaagtcagattatcggtagaagattcatcattatccctatacttaatattactgttattcataaaactacggctcaacacgaccgtctgtgtatgattgcccgaataatgcttatagactgcacccagagtataggtattctgtttaatggtaggcaaatagttcaacagatattgtttcgattcatcttcgggatccgtttccgtgtttaacttcatatcgtctatcgcgcccaatcccaagaccataagctcatgttcctgtgaaaaacgggtctttaccttgaactgagcatcggtataacggggcaaaaacggcatatcgagcaaggaaaacagtagttgcaaataagactgccttactgaaacgatataagtcgtcttattcccaatatgtcctttcgaagtcaaagccacctccgaagctccaacggttcctttaaaagtatatttatcgggagtaccgtcgagaagtttaaaatcgaatacagaacttaaagcatttccccgacttacaggaaaagcccccgtatagaaattgacctcacggataagatcggcatcgataatcccaaccggtccccccgatgcaccttgtgtgctgaaatggttgatattaggtatctctaccccgtctaagaaaaacttattttccgaaggacctccaccccttatcatcaaatcattcctgtacccgtttcccacagccgaagccacaccgggaaaagaatttacgactttcgaaatatcccggtttgcgcccggacttttttctatctcctgcacaccgataaccctcatagcgatagggctctctatcgaacttctaaacggagcggccacaacacttacctcgcttaaagccacctgcgattcttccaacgctatatcgagcgtataatcataagacgatatacgaaactcaggagagacataagttttatatccgacagaagaaacctgtatgcggtacattcccggagataaatttccaatgaaataattacccaaagaatcggtcatcgtccccatcggagtattccaaatacccatactgacaaagggcaatccctcacccgttgcacgagacgtcaccactccttttacagaatacgtttgagctccataagccgaaataaatataaaaaagagaaaaacaaaaagtgtatgtaaccgcaacataaacaatccttttttaagagtacaaagataaatatatttttgttctcgattcaaaaaagaaaataaccgattacgtacgttcaaaaaattatccgtataaataaaaaacaatagtaccatgaaaaatttatcaaatttcaatctactgattatcattttattattctcgtcttgccgacaacagccctttacaggaacagtccacataatcccctaccccaaccaaatcgccatcggaactcaatataggccaatagggaaaaacttatcgatttacctatctcccgaaagcggactggacaaagattatatcgaagacctcttgtccgataccggtgtcaaatgtaagtttactaattttaaatggatagccgatttaacgttcgacataaaacccgatacaatcggcctagaaggctatcggctcgtatccaacgactatggaacaaaaattacggcctccgatacaaaaggtctattctatggattacagacattccgacaactaataacatctcaaaacaatacgcttgttattccgttcgtcgaaatagccgatagccctaaatttctctggcgggctctcatgctggacgaaggccgttatttcaaaggaaaagaagaagttaaaaagctattggacgaaatggctcgtctcaaaatgaatacgtttcattggtatttgaccgacgatcaagggtggcgaatcgagataaaaaaatatccgttactgaccaaaatcggagggaaacgagattctacccaaatagggaactggaacagtaacatttacgatggaaaagtacacgagggattttatacacaagaagaaatcaaagaaataatagactatgcagccaagcgacaaataactatcgttcccgaaatcgaaatgccggggcatgcttctgcggctattgcagcttatccccagttaggaacagaaaaacaatctatcaaggttcctacacgcttcggagtacaataccatgcttataacgtcgccgatcccaaagtcatacaatttataaaagatgttttagacgaagtatgcaaccttttcccctcggaaacaattcacatcggaggagacgaagtcaaatacgaccaatggaaaaaatcggcacaggtacgtaatttcatgaaagaacagaatataaaaacacctgccgatctccaaatatggttcacaaataccatttcccattacctggaaagcaaaaaaaagcacatgatgggctggaatgaaattaccggagttaaaatacacgattacaccgattttgaggatgcagcctccggagcatcgcttgcagaaggaaccatcgtacatttttggagaggagacccttctttgatcaaacaaacagtcaaaaaaggataccaagtggttaactcctatcacgaatatacctacctcgattatgacacggcatacacttctctcgaaaaagcataccatttcgatcctttggcgggtatcaccggaaaagaaacggatttaattatcggaataggagcccaaatgtggggagaatggatacctaccccttcggacatgtaccgtaaattatatcctcgtatagcggcttttgccgaatgtggctggacctcaccttcaaataaatcatggaaacgttttaatcaagcggcctacaaagaaaatctccgttggaaacaattataccaataaatattaatatttattctaaaaaatctacataggtaattattgatttatctatgtagattttttagaattataaaacttcattcttttcattccttaaatattgtttttctatcattttttaccgtaatttgatgccgataaaacaagctgctcctcgacagcatcactttatgcaaatcaccagtcaacaaatagaagagatacgtgcaggcaaaatcaaaacattcgagattttgttcaacgcatattatcctcgggttaaaagctttgcattcggtatgataaaagatcaatacgaagccgaggaaatagcacaaaatgtattcttaaagttgtggtccaatcgggaaaaactctcgtccgacaacactttgagcagttacatattcaccatcgtacaaaatgaagtttacgacttttttcgagaaaaacactattcgctcggataccaagaaaaaatgttgtctactccacaaaatttacagtacgaaatcgattcggaatataacatcaaagaaataaaatccattgtcaatcgtacgttgcaaaacatgcctccgcaacgaagaacaatataccaaatgagccgagaacaattcttaagcaatgacgaaatcgccaaaaccctcggtttatccaaacgtacggtagaaaaacacatcagcctcgcattggctaccattaaaaaaaatttaggagacttccttttctggctatttatattctttattaaataaatagctgttatctcctatcgtcattttcttaccaataaagatttatattaaatttttttcacggtcgttacgtgtgtaatttccttcaatcgtataatattatataagataaaattatgcagaatccaactccaaccagacaagaactatccagttattttttcgaccggtgcacgcccaaaataagcaataaggtcgaacgttggtttttcaagaacggtaacagccaagaagccaaaaagttattattctccttatgggaagaattggaagatactacatcatctacttctcccgaagagatacaagccgctttcgaacaattcaaagctcgattactgagctccgcaccccaagaaaacaagtctaaaaaaccaaacttgtttctctggatacaacgtattgcggcaatcctcattctccctctgattatattttcggggtacttattctatcaacaccaaaaagaagaaaacatagtgtggatagaaaaaagtgccggatatggcgacatcaaacatatcactttgcccgataacaccactgtatggttgaatgccggcagcactattatttaccccgaagagttcatcggccgtttccggcaaatattctttacgggagaaggtcatttttctgtggcaaaaaataaagaaaaaccattcatcattaaatcgaacgaaagcagtatagaagttttaggaacccaattcaatttaaaatcgtacagcaacgacaacagaatagaagtagcccttctcgatggatcggtagcgttctgttatccgagtacgacagaccaagaaatgaaatgtatcctctctccgggcgaacaagtttattacaatcgcacaacccacaatctggaaaagaaaaattttatcctatccgactattcttcatggaaagatggaaaatactatttcaaaaacgaaacattggaagatattgccaaacagttagagcggaatttcgatgtcaacataattatcaaaaacgattcactcaaacaaattccttatcacatggcatttgtcaacaacgaaactttagacgacattctatcggccatgaatttagacggatatttaacaatcaaacgagatggtaaaatcatagaaatttattgacaatcaaactaatttatcatgaaaaggcacaaaattcatcacttcgccgacattgtcggaagatgcaagaaaggcataatcccatttttattatgcttcgtctttatgggatacggacaaaacatatctgtcaacttcccgaatataacagtagaaagagctttggaaattcttcggaatcaagaagggtattctttctctgtcaaaacaaatgatgtaaacttacgacaaaaagtcaatgccgatttgcaaaaccaacctatcgaaaaggtattggaaaccatattccaaaaccaaccggtttctttcgaaatagaaggtaaaatggtaagaatcattaaagcccctgaaaaagattcgaaacaaacaggaagcacagccgaaagcaaaaaaatctccggtagagtaaccgataaacaaggtgacccgctcatcggggtaagtatcattgcaaaaggagccaacaaaggcacgataaccaatatagacgggtattattctttaactgtacccgacaaatctgttatacaattctcttatgtaggctacgatacccaagaactaaaattaggaaaagggaatatattgaacgccaccctacaagaaaagataaatgacctcgacgaagtggtcgttatcggatatggcagtatgaaaaaaagcgacctgacaggagctgttacctcggtaaaaaccgaagatcttccgatggcagccaacacatcgatctctcacatgttatcgggaaaagccgccgggataacatcggttcaaaacagcgcacaaccgggtggcggcgtcactctgcgtatacgaggcgaagcatctaccggagccggaaacgaacctttatacatcatcgacggatttccagtaggaggatcccaagtcgaaccggcggcagacaacagatatagcgatttcgggtctcgtaatcctctgaactctatcaaccctaacgacatcgaatccatagagattctaaaagatgcttcttccacggctatttacggagcaagagctgcgaacggtgttatcatcattacgactaaaaagggacgcgagggaaaacccgttgtcaattacagcgcaaactatggcgtccaacaaattgccaacaagacggaaatgatgacggccgaagaattcatgaccgaagccaacaaattcgccaaagagcaatggctctataacaacagagtatatccatacggaaatacgaacccatcgtcgataaaagaccccatcgtctatccttatgaagcaaaagatataaaaaatgcggggaaaggaaccgactggtatgacttaattaccagagaaggtatgattcaccaacacaacttatcggtatctggcggaacttccaacctgaaatacatggcatcattcaacttcttcgatcaaaacggagttgttcgaaacagtgacttcacccgctataccggacgtctgaacatcgaacatcaaataaataaaatattcaaatacggaatcaatgcgactcaaagttacatcaagtcctcgaatgttccattgggaacagaagacttcgaaaactctggattgataaactcggctatgtcgtacgacccgacgacacctgtcagagacaaaaacggggattatgcgcaaagcgatcgaatgactactgtacccaatcctgtttctatgctcgaaatagatgactatacacaaactaaaagattattggtgaacgcttttcttcaagcagaaatcataaaaggattggttgcgaaaatcaatataggattcgatgaccaaaacggcgtaagaaattcctacatacccactactacattatacggtaagcaagaaggaggaaaagccagcaaaagtatggcacagcaattcgaccgcttgttagaagcaaccgtaaactataatttcaatattgcaaaagcgcacaagttcaatattttagcaggatattcctatcaagatttcaacaacgaaggattctctgccgccaattcacaatttttcaccgatatattcaaatacaactcactggcttccggagaagcagcccgccccacggtagcttccaacaagtcaaaaactatgttcatctcctacttcggtcgaataaattataacttgttcgataaatatcttttcactctcactgctcgtgtcgatggctcaaaccgattcggtgaaaacaatcgatacggaatattcccgtcgggagcatttgcatggcgtatcaaacaggaagactttttaaaagacgtcgacttcctctccgacttaaaaatgagaataagtttaggtcagacgggtaacagtgaaatcgggaataacgcctttgaatactatacggcagcatggcaacaatatgtgtttggcaattcgattaacaccggaacggcaaaatcgcaaatcgccaacccagatttaaaatgggaaacaacaaccgaatttaactttggtttggatttcggattcttcaaccaacggttaagtggtacattcgaatattttaaaaaagaagtgaaagaccttttgggttaccgctcgctaaaatcattcatggaagtatctacggtagccgccaacatcggaaaaactcaaagtaccggtatagaaatttccttgaaaagccgaaattttacaggagaattcaaatgggacactgaacttaatttcacccgatatgtagaccgttggaaagagcgtaatcccgaagacgaactaagcccttggcaaaaagcgaatgatcccattcgagctcactacggatacctatccgacggagttctgggtatagacgagacacctcccgcttccatgcccaacctgctgcccggtgaatataaaataaaagacgtaaacggttatctccgagacgacttcgggaaccttatacccgatgaaaacggaaacgttcaatacacagatgccccggacgggattatcgatgaagcggatatcgtattattgggaacatacgatccgggcttctcaatcggatttggaaatacattcgaatacaaaggtttcgatctgaatatattcttttacggcatgttcgaccgaatcgtcaacaacgccacgcgtggaaaattctccattcccaatattcgttttattctaaacggacaaaacatgatgaaagaaatatccgaacgttggtctagtgaaaacccacacagcaaatatccgtctggattcgtaagccaatacccgcagccatctgattatctgtgggaagacgcttggttcatacgctgtaaaaatatcactctgggttatacacttcctcaaaaatggatacggaaagtattttccagagcccggatttttgcagatgtttcaaatcccttcgtaattacaccttactctggcaatgacccggaaaccgatttcaaagccggttaccccaatcaacgtacctattcttttggagtggacataaccttttaatcctatatgaattatgaaaactaaaaatatatttttctcctcgctgtttctcatagcagcatattcgtgctctttggaaaacgaaacttatgatcaacttggctccgataacgtgatgactaccgaaaacgatgtcaaagccgctgtcaccgggatataccacgaactacgtggcggaggctgggatcgctataattgtgcatggggttctctactaactatgcaaatcggttgtaccgatgaatgtgactgcaactgggtatgggacaaacaactcgattttctgtggactgctgaaacaaccgatttagggcaattttataccggactagttcccgctgttaccaaagcgacctctctgctggaacgcatgcgaaaaatatctatatccgctccaataaaacgcagatatatggccgaagtccgatgtctcagagctatgtgggcatatgatctatatgatctctacggaacagtaccattaattaccgatccagatatagccctcgatcctcaaaaagcccaatcttatatgccagaacggccctcgatagaatggtatgtcaacttcatagacactgaattaaaagaagcagaagaaaatttgaaaccggccagtctgctcgcggcaagcgaatacgggagaatgaccaaaggtatcgctcaaatgtatatgttgaaactctatatgcatgaagccggtcaagaacgccactatcgaaacgacgaaggcaaagctatgatgtggtggaatcgggtagattcgattaccgaagtcatgataaaagacggagaatactccctgcaaaaagattacatgtcaatatggtctccttcgaatcaaaggaacagcgaagtaattttcccaatacccaatttccccgaaggcggcttaggaaactgtttcctcgcacatgcattacccgccgattatgtatcgcaaaacggaatagcattgactaaatggggagggttccttgttccctgggatttttacgacacctatgatcccaaagacaaacggagaaatgctttgttggcgacctattggaatggaaaaaagatggtcgaccgccgtactgaatacacgggtaaaccgggtgctgttccaatgaaataccaagaaaatcctagcacgacagggcaatgggatgccagcgaatacgtaataaaccgatatgccgaagtaatattggccagagccgaagctctgaacgaaatatacggtccgacccaagaggccaaagacctcgttcatgaaatacgggaacgagcattcgataattacaaaggcagcaaatacgaaaaagagataaatgatataaccgataaagatgcattcagagcacacctattaaaagaaagaggttgggagttttgttgggaaggcatgcgtcgccccgatttgattcgtcatggagaactaatatccaatgccattgctcgtggcaagcttatggccgaacccaaacacattctatatgcaataccacaatcggtaatttatgaaaatccaaatcttaaaaataacgaaggtttttagttatgaacaaattaaattttaaatatctgtttcctaatttattcctattttgtatctgcatgaatcttacagcgtgcagtgaaaagaacagtggcggagacaatctacaatcgggagatgaaataatctcgttcgaacccgacctaaatacacttatccgcaatccagcatcgggttggactttatacgacgatgcaaacgactacgtcgcacaagcgaatacctattggaatcaacagggagccgcagcagaaaaatatgcttctattttctattggcgttcccgatggtctgagctcgaaccagaagaaggtaaatacgcatgggaacatgacgagaatttcaaagcgctcattcaaggcgcccttgaccgaggattgaaattggcattcagagtttacatcgacggacaagacaatattcataacggtactcccgacttcgtaagagaggccggagccaaaggttatgcagtccataagctctgggaccctgcaaatgaaaacaacaactggactccctatgccgacgaccccgtctttcaggaaaaattcgggaattttatccgtgctttcgccaaagaattcgacaatcccgaacaagtagattttatcgacgcttacaatttaggctggtggggtgaagggcatcacgtacaatatttgaacaacaataataaattcaaagtgtatcaatggattacagacctatatgccgagaatttcaaaaatgttttgcttgtcgtgaactttggaacagaaataggattcgaatatgaaaaacgattggctatcgacaaacacgattttttgactcgccgtgacggaatcggcagttattggttccaagatgcagaagtcaatatcatcaactcgcttttcccacaaaaagcattcatagccgaaggctgctattggggaggaaattccgacagctatcaaccgtggaacaccgatccgctttatgccgacaaattcaaatcatggtccgacttttatactcaggcttataaagacgctatacgaggacatgccaatacactcgatttgagagaggctaccgaaaccagaggttggataacccacgccaaagatttggtaaaagacttcattagtaacggtggatacagattaacccctatccaaatagaatatccagcatcggtacaaatgggaaatacattatccataaagcatacatggcgaaatagcggggtaggcgtatgtcccaacaataacaaaagatggaactataaatataaagtttcatttgccctactcgatcccgaaagccatgaaataaaacaacggatcaccgatgaaaacgcagaaccgtcggcatggataaaaggaaccgataaaacgtataaaaccagcgaatctttaattgtcccagccggacaatacatattggcagttgccattacagacgatacccaaaatcaaaaaccgggattgaatcttgccgtaaaaaacgggaaattcataaacgactggctacaaatcggtactatacaaatcactaaataattcatcaaccctaaaaacacaattacaatgaaaaaatcacttttttatttagcagcaacactactcattgctacgacctcatgttccgaagacaacaatgacgatgaccccaaagggcaagagagcaacattacactatacgcgcccgacgatttggaagagtttgatcttttgtacgaaaatcccacacgaaaactgaaattcgaatgggaaagcgataaagaaggagctacatacgctcttatattcagcctcgatgaagagatgaacaacatcgagagaattgatatcggaaccgaaatgtacacatctctcacccatcaagacctcgacgacttactcggtaaactgggcgtaggcgaatacaaaagaggtgaattatattgggcggtcgaaagtgaaaacgaaggaaccttgtcccgcagcgaaattcgcagcatgaaattgttccgtttttataaacctttcatcgatcctcgtgacaacgaagaatatcgcgtatgtcgtgttttcgatcctatatccgaagattatgccgtatggttggccgacaatttaagagcgacgacctattccgacggaactcctcttggagaaaatgatgtaaaattctatactccccaagaaggagaagacgaatcttggacaaaagttttcggagggtattacacatggaccgccaccatgcggggcactcgtggagcagaagaaggtgaaaaaattcaaggtatagcgcccgaaggttggcacataccgactaaaactgaatgggacttcttaatcaatgcttgcggtgaccccactatgcccgccaccatattaaaagaaaaaagctattgggatcctaatgccggagatgtcggtatgaactctatcggattcaatatggctgggactggatacatttggagcatacctgaaaacgatgtaatagaagcctttgccaatacctatttctggacctcgacagctcccaaagacggagatgtgtacccgtggaatcccgatcccgtaaacttccccaatcagggagtaacatacggattcacacttaacgattcaggagccgccctttatccttacgacaggaacagaggatatagtgtccgctgcgtattagattaaactattgctatacgttattgccggatccttcggcaataacgtataacatacttatcctaaccccgataactgaatatcatgaacatcaaaacctcaattgcaatagggctactcatactcctactttgttctaattgcaccaacgacaacaaaaccaaccaaccggaatccaccgcaatattagccgaacgcccaccgatgggttggaacagctggatatgctttggaacttctgtaacagaagacgaagttaaagccaatgccgacttcatggccgaaaatctgaaaaaatacggttgggaatacattgttatcgatgccggttggtatgcgcccggcatggagactttggagcaatatgaatcgtcaacgccacatcaaatcatcgacaaattcggacgcctcatcgtcgatacggaaaaattcccatctgcaaaaaacggagaagggttgaaacctctcgccgattatctgcatagcagaggcttaaaattgggtatacacatcatgagaggtattcccattcaagcggtcgaagctaatacgcccataaaagggacatcatatcgagcacgagacattgtcaataccgattctcgatgcaaatggtatttcggattttatgggatagacatgagtaagcccggagctcaggaatactacgactcgcttttcgaactttatgattcatggggaatagactatgtaaaggccgacgatttactatctcccatttatgcacacgacgaaatagaagcgataaccaaagccgcaagaaaaagaaaaaggccctttgtcctgagcctttctcccggccctgcccctgtcgagaacataaaacatttgcaaagcgtagcccaactatggcgcatttccgaagacttctgggacgactgggaggctctgaaagaacaatttccactttgccggaaatggcaaaagtatatttgtaaagggcactggcccgacgccgatatgctccccataggcccaatggcacaaagagccatgagagggactccccgaatgagtaattttacaccagacgaacaatacacaatgctcacactatgggccatgtttagatcccctctgatgattggctgtaatctacccgaaatagacgatttcacgctaaacttgattacaaataaagaggtacttgacatcaatcaatattccaaaggaaataaagaattgttcgatcgaaatggaataatcgcttggtatgctcaaagcgaagacgaattgacccactatatcgccatatttaacactaccgataaagatatagaatcttacacctttccactacaaaccataaattatatcggagacggtcacatcaccgatttgtggaaaaacgaatcaatggaaatcaaaaataactcagtctcgttttctgttcctgcgcatggcgtaaaactgattaaactaactaaatagtcttgtaggtatgaaatcatcacatttttattatataatactattctcgtttttacttgccgcctgtaaagacgacgggccgggtgaaaaagaaaattcggacaacgacgttccctccgtagcgaccaatacttggctattaaacagtctggataacatagaaaattattccaactcggatccagaaaaccgatacgatataaatatggttcgtaacgaatacgaaagtgtacagctcgttatacaaaccgatagtaaaaaaaggctgaaaatagaacgtatcggtaacaacgatgccattgaatttcaatgtcggaaactggaagctttcaacgggaaatacgatgttctgattccttgcgataacgaaatagaacccgacgacaaagtagtgcgagcttggctcacttttaaagtcaagtccgaagccgaggctaaacgacataaagaaatcatacgattcaaaaccgatgacaaagaatatgccgtagctatatcgattaatgtcgttaacgcctctttgccagaaactccatctattgcctcggtattcggaatcaaccctcaaaatttcatattcaccggtctatcggaagaacaaaaaatagaaaagcgcaaagcagcttcggatcttttattggaatatcgcatatcgccctacttttccacatggctgagcggaacgatgaaaaccgaatgtttctcctcgccatacgcatggaatgacgatcgcacttgggaatacttggcagacaaacgttttagccgtattgccttgccatcgcatgggttatccgacgatgagttagagataatgctgaataaagctcgcgaaaccggattgctaaacaaagcatttttttatgtatgggacgaacctacaaagaccaacgaatatgaacaaatcaaaactctttcggatcgcattcatcgatatgcaccggaagccaaagtgctcactacattctattgcggccctaccgacggagaacacaaagacgatttattcgccgtattcgacattctaaatggagcgacatctatttattgtactggcgtatgggcgttgcaggataatgaaaatcgctcgaagcaatgcaaagccaaattaaaatcaggacaagaatggtggagctacgtgtgcatgtctaacactccggggcttgcttcaaattctaccgctatcggtaacagggcgaccatgtggcgtaattataaagaacaaaattccggattcctatattgggtcgtcaacggattcgccagcgtttatcccctcagacctcgccctgaactgcccgaaggagacgggatactcatctatcccggtgaatcgttcggcacaaacaaaatttgtacctctgtccggttggaacgatggcgcgatggagccgaagattacgacatgctggtcttgtacgaaaaaaaactcggacgatcggccgccttatctcttctcaacaacgtttataagagtccctcgaactacacagatcaaagcaaatacgcattggctctacgtaaaaatttaattgaaaacatcacagaataaatatttcgatatgcaacatcaccttttctatcggcttctcatcataagctgtacattctttttaatctcttgtcaacaaacaatcgaatgttaccttataccttcgaccgacaaagcatctgatttttataaagttcaacctcgaaattccggcacgttattcctcgctaaaaatgaagcggaacatatccaaatcgttttcaaaggctgtccgggagagacctataaaatacatcgaaacgaaaatgccgacaattctatccgatatagttgtcggcaaatcaaatcggtatatggattcgacgatgccttagtccccatagatggagaacaagttactttaaacgactctatcgctaaactatggattacattccatacggccgagtcgacccgaccggggaaatacgaagaacaaatttcgatcgatggtaacggaaaacggcaaaaaataaaaatcgatctgcaagtgtacgacacggcattaccctcgacaccttcgctaccagcagcattcgggatcatagaaaagaatctcatcgactcggcttcgaaagaacaaactttgcaaaacaaactggaatgggcagaattatgccttgattatcgcatgaacccctatttctccacatggttggccaacagcatgaaacatgaagcatcttcatctccgtggaaatggaacgacaagcgaacggttcctttcctatcggacaaacgattcaatcggttcgctgtcccctaccactctctgtcacacaacgaattggacagcttattacagcaattaaaacaaaccgatttactcgataaatcctacttctacttatgggacgaacctacttatatgaaagaatatcacctcatcggtcaatattcccaagaaatacacaagctcatgcccgaagcaaaagtcctcacgaccttttactgcggaccaaaagacgggaaatacaaagaccggttgttttccgtattcgacctttggcgaggagacactcaaattttcagtatgagcgcttgggctttacaagcgaacgaagccaacgcagacacatgccgttctcttctccgaggcaatgaagaatggtggacttatgtctgcatgggacccggagaagagcaacccaatttattactcacgatggacggatatcagcatcgagctgtattatggcgcagctggaaagagcgtaccaccggattcctatattgggcagtcaatgcctatgccgaatccgacacattggcttttcgcaaagacctccccgagggcgacggtgtgctgatttaccccggtcaatatttcaacagcacaagccccgtagtatcgatacgaatggaacgttggagagacagtatggaagactatgaataccttgccaagctcgaaaagaaaataggaagagccaaaagcgaaacccttttccaatctatataccaatcgcccgaaaaatactcgaaaaacaacgcagaaatagaaaaattcagaaaatccattttagaaattcttagtaaataattctttaatcatttaaatttcaaatctatgaaaataattacttcattcaaaatcgcaggtttaataacagcctgtctttttgcagctatgcctacaaaagcggacatcggagctatttctttcaaaacatcggctgccggtatgaatgcgttggaaacgacaatcgggtctaatcaaatgactttagaaacatggttatatatagacaatagtaccggatttttcgccagcaatatgcacaacgacaagggatttgcattaggattcgacgggtggtttaaatttcagttggacggagcatctatatggatcgatcctacttcttggaaagagaactggactcacatcgcttgtgtcgccgacggaagtcagatgattgtctatgttaacggtgaagtagccggaacacaggagaatacaacaggatataatacggaagccgatggaaagcctctttttttgggaactgctccgtggggcaatccttgcaattgcaaaatggcagactttcgactttggagtgtagcccgcacagcagaagaaataaaaaataattatcagaaacaagtagaaccgtccgcgacaggactgattaaaaatttcaatttcgcagaaggtaatggagaccacacggccaacttagcagagcccgaagggaatcaagcatggtgtatgggcgctatcgataccgattacagttgggaaacagtagcgcagatacctacgaatctacggacagaaaatcaaaccgaaaattcattcgacattttatgggacggaaccgacggtaacacatggagtgtcgaattatctgccaatggacaagttgtcgacacgaaaaccagacttaccgaaaagaaggccagtttctctaatctcgataaaaaagattacactgtacgtgtaaaggcacattcgtttatggaaactgcattttccgatgctttctcggtcaatctatctacctcctcggccataaccaatattcataaaaatatttctattgtcagacacaataacgcaatccaaattgacggcattcaaactggaaaattgatttcgatatataccgatcaaggcattttgagccgacaaatttcagccgaacacgaaacaacggttctcagtatagaaggattccctcatggcatatatttcatctccatagaagggtacggtccgacatttaaaattgctctttaataaatcttccataaactataaaggcgggaacatgcaatgtctcgccttttctgtatctgctttttcggaacaaaaatatatcctatctttgcacgcatgagtaagaatgagaatattataaataaggttctaatcatcgacgatgaaccacagataagacagttattagcccgcattttagggctggaaggatatgaagttttacaggcaggagactgtaaagcggcagtaaaacaaatggagtattctcccaatgttgtcttatgcgatgtttttctccccgacgggaatggtgtagatttcataaaaacaattaaaaaaatatcgcccgaatcggaaatcattttattaacagcccacggaaatatacccgacggggtacaagccataaaaaacggagccttcgactacataaccaaaggtgacgacaataacaaaattattcctctgattagtcgggctatggaaaaagctcgaactaacggagtaaaaaatcgtcccgaaaaagaaacctttcagcaatattcattcaattctattcttggtcagtcaaagcctttgctggaagctatcgcgttggcacgaaaagtggcatcaaccgatgtaccggttcttttaaccggagagaccggtacaggaaaggaagttttcgcccaagcgattcaccacgagagcaaacgaaataaaggaaatttcgttgcaataaattgttcggcatttagcaaagaactcttggaaagcgaaatattcggacataaagcaggctcctttaccggagccttgaaagacaaaaagggacttttcgaagaggctcacaacggaacgatatttttagatgaaatcggagaaatggcgatagagttgcaagccaagttgcttcgagtattagaaaccggagaatatatcaaaataggtgaaaccaaaccgacatctgtaaatgttcgtattattgcagcaaccaaccgaaacttgccggaagaaataaatgcagggcatttcagggaggatttgttttatcggctgtcggttttccaaatacatttaccgcctttgagagaacgtccgggagatattagacttctaaccgaagcatttgtacaatccttatccgaaaaaatgacccattcctcgaaaacggtttccaaagcattcatcgacatgctcgaacaacaagaatggaaaggcaatgtgcgtgaactcagaaacgttatcgaaagaagtcttattgtttgtgaaagtgatgagttacaccccgaagatttacccatagaaatacaaaatgcaacttttaaggaaaaaagtagtaataatagtggtttcgaattatcggctatggaaaaacgccacatcgcccgagtactggactatacaaacggtaataaaaccgaagctgcaaaactcctaaaaataggacttaccactttatatcgaaaaatagaagaatataaactctaatttttttcaaaataatacacaaccctaccaaaatgaaaagggagcatctggtgaacagatactcccttttcatttataatactaattatgaaccaattaaaatattcaaaaacaatattggcacaactttggcataccccaaaccgaaaaaaaataatttagtattcacttaaaaaaaatgtaacatggaatttgacgcattaggttttggagtttgtatactcagtggaattgcctgtttctggctcttctataagtgcatagactggtttgaaaaaatttaattaaaaggagatttaacatgtacactgcattatttattatcagcgtaattatgttcgggtatctgatgtatgtattagtaaaacccgaaaagttttagtcatttataaagattaaacacaatgaatacagagatattaggtgttattgcacaaattgtcctgatggtcgtactcgcctaccccatcgggaaatacatttcaaaggttttcaaaggtgagaaagtttggtcggacttcatgactcccatcgaaaaaatcatgtacaaactgggaggtgtcgatccaacagaagagatgaactggaaacaattcctgaaagcattgctcgtgataaacctcttttggtttttctggggaatgatattgttagtttctcagggagtactgcccctaaatccagacggcaatttaggacagtctgttcatcaggcattcaacacatgtatcagcttcctcgtgaattgtaacttacaacattatagcggagagagtgggctaagctatctcacccagttattcgttatcatgctgttccaattcatcaccgctgcaaccggtatggcggcaatggcgggtatcatgaaggcattggccgctaaaacgaccaaaacaattggaaacttctggtacttcttagtaaggagctgtacccgtgttttacttcctatttgcctcgttatcggattcatactgattatagaagggacccctatgggctttgacggaaagatggaagtgactacaatagaaggacaaacacaatatgtatcgcaaggtcctactgcggcgatagttcccatcaaacaattaggtacgaacggaggtggatacttcggagtaaattcatcgcaccctcttgaaaatcctacctatctcactaatatgatagaatgttgggccatattgattttacctatggctatggtattcgcttttgggttttaccttaaacgaaagaaattagcatacagtattttcggagtaatgctatttgcttacttagccggggtatggataaatgtatcccaagaaacaggtggcaacccgcgcatcgacgcaatgggtatagcacaagacaacggtgctatggaaggaaaagaagtccgactgggttctgctgctacggcgctttggagcgtgacaaccaccgttacttccaacggctctgtaaacggtatgcatgactctaccatgcctctctctggcatgatcgaaatgctgaacatgcaaatcaatacatggttcggtggtgtaggtgtaggttggatgaactactttacttttatcattatcgccgtatttatcagtggattgatggttggtcgtacccccgaattcctcggcaaaaaaatagaagctcgagaaatgaaaatcgctacgatcgttgccttgttacacccatttgtcatcttagtaggaacctcattagcggcctatttatatgttcatgcaccttcctttgtcgaaaacgaaggcggttggttgaataacccgggattccacggactaagcgaaatgctttatgaatttacttcctgtgccgccaataatggttccggtttcgagggattgggtgataatacatggttctggaactactcttgcggtatagtattgatactcagccgataccttcccatcgtaggacaagttgccattgcaggattattagccaataagaaatatgtaccagaaagtgcaggaaccttaaaaaccgatacagttactttcggtgtcatgaccttcgctgtcatctttatcgttgcagctctgtcattcttcccggttcaagcattaagtactattgcagaacatttcagcttataataacagaacgatagatatgaaaaataataaatcagcttctttatttgaaaaagagcaagttttaacgagcttaaaacaatcattcgttaaattgaatcctcgaatcatggtgaaaaaccccatcatgttcacggtagaagtttgtacagccattatgttccttgtgatgatttattccatctttgacaacgctcaaggttcattcgtgtacaatgcatgggtttttgttatcttgtttatcacactattattcgccaacttcgccgaagctatcgctgaggcccgaggcaaagcacaggctgatagtctgagaaaaacccgcgaagaaactccggcaaaactacttgtcaatggacaaataaaaacgacaagtagctctcaactgaaaaaaggtgatgtatttatctgtgaagcaggtgataccataccagccgatggtgaaatcataaacggattggcttctatcgacgaaagtgcgattaccggagaaagtgctcctgtaattcgagaagccggtggtgacaaaagttcagtgaccggtggaacaaaagtcctttcggatcgcatcgaagtgcttgtcacacaacaaccgggagaaagtttcttggacaaaatgattgctctcgtcgaaggcgcttccagacaaaaaactcctaacgaaattgcgctgacaatccttttagccggcttcacactggtattcctaatcgtatgtgtaacccttaaaccgtttgccgactatacaggaactgttattacaatagcatctttcttatcgttgtttgtctgccttatcccgacgacaattggaggtttgctttcagctatcggtatagcaggaatggatagagctctgagagcaaatgtaattaccaaatcgggaaaagcagtagaaactgccggagatatcgatactctccttttggataaaacaggaactattacaatcggaaaccgtaaagctacccatttctatcccgccaacggtttggaaaatcatgcttttgccgaaatttgtatgatgtcgtctctatccgatgaaactcccgaaggtaaatctatcgtagaactggctcgtgaatcgggtttaagagtacacaacttgaatacaaccggtagcaagcttatcaaattcagtgccgaaacaaaatgttccggtgtagatttagcagacggtactcggattagaaaaggggcagcagaagctattcgaaaaattgctcaaaacgcaagctacgaaattccacaagatttggaaaatcgtatcacagagatttcaaaaaatggaggaacccctcttgtagttagcgtcaatgaaaaacctgccggtgtcatagaattacaagatgttatcaaaccgggaatacaggaacggttcgaacggttgcgtaaaatgggagttaaaacagtcatggttaccggggataatccattaacggccaaatacattgcagaaaaagccggtgtagatgacttcatcgcagaagccaaacccgaagacaaaatgaactacatcaagaaagaacaaagtgccggtaaactggtagccatgatgggcgacggaaccaacgatgctcctgctttggcccaagcgaatgttggtgtagctatgaatagtggaactcaggcagccaaagaagctggaaacatggtagacttggacaacgatccgacgaaattaatcgaaattgtagaaatcgggaaacaattattaatgactcgcggaacccttaccacattctccatcgccaatgatgtcgcaaaatactttgccattattccggctctattcatgatagccgtaccagaattagcttcactgaacattatgggattacatagccccgaaagtgctattctatcggccattattttcaatgcaatcattattcccatattgattccattggctttaagaggtgttcaatacaagcctatcggagcttcggctttactccgccgcaacctgctcatttacggattaggtggtataatagctccattcgtcggcattaaactcatagatttagtaataggattattcttttaataaaagcaacaatgaaaaatttcataaaatcaatcaggctaacattagttttctgccttttcttctcagtattttatatactgatattatggatattcgcccaattcgcagggccaaactctggaaacgccgaggttgcgaccttagatgggaaaatagtgggtgcagccaatgtagggcaagtcttcaccgaagacatctatttctggggccgtccctcttgtgccggagatggatatgatgccagtagttctgccggtagcaacaaaggacctacgaacgaagaatacttggcagaagtagaaactcgtatcgacaccttcttggtacaccacccttatttggaacgtaaagatgtaccggcagaaatggtcacagccagtggttctggtctcgaccctgacatcacgccagaaagtgcatacgtacaagtaaagcgtgttgccgcagccagaaatatggacgaaactaccgtaaaagaaatagtagaccaaacaattgaaaaaccatttttaggattattcggaacagagaaagtaaacgtattaaaattgaacattaatttagaaaattatgaaaacaaataaaaacatttcagcaatagctaccatgaaaaagaaacaattaatcgataaagaaggcgctagccttatcagagcattgataatcatttcgattataggactccttgccatgtttaccaataaagcatctgctcaagtacgattcaatgtacaaggagatttagttagctcctatgtgtggagaggtatgtatcaaacaggtgccagtattcaaccgacgttgagtttcagtgttgaaaacctatcgttgacggcatggggatccaccgacttcgatggttatcggaatggtaatattccctctgcgaataaagaacttgacttgactctggcttataccttcccaaaattgggactaacagtttcggttgccgatatgtggtgggccggacagggagctggaaaatatttcgatttcaataacaagacgacagctcatcatttcgaagcaagtcttgcttatgtacttccggtagaaaaatttcctctttcgatcgcatggtacaccatgtttgccggtatggataaaaatgaaaaaggcgataaaaacaactactcgtcttatgtagaactcaattatccgttcagtgtaaaatcggtcgatctcaatgtaacatgtggtatagtaccttataaagcacctcaatactataccaacggatttgccgttactaatgtagcattgaaaggaagctacgcaattaaaatcacagattcgttctcccttccgatattttcacaagtaatatggaaccctcgtatggaagatgctcatatcgtattcggaatcactcttaaaccataacagggagaatggatataattgaaaacgaaaaaaatgtacaatattttctcgacttgataaaaaaatcgaggaggggtaagtttaaactctacatcggcatgattgccggtgtagggaaatcttatagaatgctacaagaggcccacgaactcttagaaaacggagtagatgtaaaagtgggtttcatagagacacacggacgtaccggtacagaagctattttacaaggtattcctgttatcccgagaaaaaaaattttctacaaagggaaagaattggaagagatggatttggatgctatccttcaaatacgtcccgaattggtcattgtcgatgaactggctcataccaacgtcgaaggcagtcgcaatgaaaagcgatggcaagacgtcatggagttactcgatgccggtatcaatgttatatcggcagtaaatatccaacatatcgaaagcctgaacgaagaggtgcaggaaatatcaggaatcgaagttcgagaacgaattcccgatcgtgttttggaagaggccgatgaagtcgtaaatatagacctcacagcagaagaattgatcgaacggttaaaagccgggaaaatatataggccggaaaaaatagaattggcattgaataattttttcaaggccgagaatattttacaactacgagaactcgcactcaaagaagttgctttacgggtcgaaaaaaaagtagaaaacgaactccccttagatacatctcacgtacgtcatgaaaaattcatggcgtgcatcagttcccacgaaaaaacgccccgcaaaatcattcgacgctgcgctcgattggctacacgatataacacaaaatttttcgtactatatgtacaaacacccaaagaggatcccgatcgcatctcgctggcagatcagcgacatctgttaaaccatttcaaattagccactgaattaggtggagaagtcatacaggtacattccccgcacattctcgaaagcattataaaggtcgcaatcgaaaaacaaattacaacaatatgtacaggaattccagcactgaaattgccccaaaccatatttacggtgtccaaatataaaaatttcatgaaatctttatccgagaacaatatagatttaattatcttagcctaataaaaatacccgtcatgaatataaaaacaaagttgcttttaagtatagggttactgaccggaatgattattctgctggtctccttatcagttatctatttacagatgctgacggctgccgaaccagacagcccgatagcttcgacaggcttaaaacaagccgttgtatgggtggcaattatcggaggcatctgcatagtctgcggtgtcacattagctatctggcttcctcaatcgataaatagacctatcaaggagctaaccgacggtatcctcgaaatagcgaatcgcaactatgaaaaaaggctgaatatatcggataaaaacgaagaatttaaaaatgtggtcgatagtttcaatagaatggctcaacacttgtccgaatacagatctaccaccctatcgacactactggcacataaaaaatttctcgaagcaattatcaatagcatcagcgatcccataataggattagatccagaccgcaaaatacttttcataaatagtgaagctctgaacatactgaatctgaaaaaagaaaacacaatcttcaaatcggccgaagagatttctttgaagaatgatttattaaggaaattaatacgagaactggtttctcccaatcctcagaaagagcctatcaaaatatatgccgacaataaagaaagttacttcaaagcctcctatatagaaatagacaacacgaatcacgacagtgaagaacccgaaaaactggggcacgtaattatattgaaaaacatcacggagtttaaagagctggattctgcgaaaacaacatttatctcgacgatatctcatgaattgaagactcccatatcagccattatgatgagtttgcaattattggaagacagacgtatcgggtctcttaacaaagaacaagagcaactctcccaaagtattaaggaaaacggagaacggttgctcaatatcaccggagaattgctgaacatgacccaagtagaagccggaaaactacaactgatgcccaagataacccggcccatagaattgatcgaatatgcgatcaaggccaatcaggtacaagccgacaaattcaacatacacatcgaagtcgattatgacgaaaatacaaagaaactattcgtcgacagcgaaaaaatagcatgggtacttaccaatcttgtaagcaatgccatacgttattccaaagaaaacggtcgcgtcattatcggcacttaccaagacggcaatatggtcgaaatctatgtacaagattttgggaagggaatcgaccctcgctatcatcaaagcatattcgaccgttatttccgagtgccgggaacaaaagtacaaggcagcggattaggattgtctatatccaaagattttgtagaagcacatggggggactctttccgtagaaagcgaattaggaaaagggagccgttttatactaagattgaaatcataataaacggggactaaaaatctcaccaatcgatttcccgtattcccttactccgtaaaaatgcattcgctctactgaaatgccgacatccgaaaaagccacgatcagccgatcgtggcgacgggtgcgcggctgttaaaaccaaatgcttgcgagcatcaataagcgcaatcttctccttagcataactaccccacagcataaacacgagattttctctctcatcgctcaactttcgaatgaccgcatcggtaaaaatctcccagcccatgtttcgatgcgatcctgtttcatgagctcgcacggtaagcacagaattcaaaggaaatacaccttgcctcacccaccgatccaaattgcccgaagcgggaataggcttgcccaaatcatcatgtatctccttaaacatattaaacaaagagccgggaatagccaccccctcgggtacagaaaaacaaacaccgtaatactgtccgggattgggatagggatcttggcctaaaataacaactctcacagactcgaaaggacatgcatcgaatacatgaaatatcaaatgtcccggaggcaaaacatgcgcacggccatattcgctccgcacaaaagaaaccaatcgctcgaaatagggcttatcgaactcgtcttgcagcctctttcgccaactttcctctatcctcacattcatatcttataaattatttctccaatgacagcgcagcttcggacaacaataaatacactcgtaccgaaatctcccttatcgcattgcctcttgcaaagttacataaacaatgcactaaaagattcatacggcctacctttttatttttagagtcattacaacaacctataaacactcgccgatatacaaacagacttctattcgaacacagaaaatcgcatattcccagcagagattaatataagttatgactgcgtttaaaccttttttcgttaacttcgtcaaatgaaaaaaaattgcacatgaaaccactacttatccttatttcgattttattcggattcctatccatgcaagcccaatatgactatccctatgatagcggcaatcattactacgataataccccacgtcttatcattcagaaaagccgaatcatgggttggtacgtttccgacataaacggaaaccgcattagcgactattacgaacaaatccgaccttataggcaaggtcgggcagcagcattagacaaaatcatgggttggtgtttcatttccctcgacggtaaacgatgcaccgattattaccttctcgtcgacgatttccacgaagggtacgcacttgtcaaagataaaatcatgggctattgtttcatcaatagagacggtcatcgactcggcgactattacgaagaagcctatccgtttcaccgaggcgtcgctttggtgaaagacaaaatcatgggttggtacttactgaacactgccggaaagcgaataagcgactatcacgattcgcctcgcgattttcaaccgacaagaccattgtaccgtccgtggtgaaagccgaattttctataatagacaaaagtaaagaaataaaaaagagagtcaccaaactgtaactctcttttttcaagtggtgccaacgggaatcgaaccagtgacacaaggattttcagtcctttgctctaccaactgagctatggcaccatcatttttgcgtgtgcaaagataataggtttattccaatttaccaaatatattgtcgaatttttccgttcaaaaatataaatatgcaaacgacgcaagggacgaataaattcttattcttcggcaagagaattccacccctgtgcccgaagggttatctcggtatcgtcacgggttatcatgcaacaacccaattctggttttgtaatatgtcctatcactcgcactccggggatagcagcgacaatgtcgtgcttttcgagaggtacggtaaaaagcaattcataatcctcgcctccattcaatgcagcagtcaccagattcatattaaattcctccgccatagctgccgtctggtaatcgatcggtatccggtcttcatatatacggcagcccacatgactctgcgaacaaatgtgcaataattcggaggagagcccatcagaaatatccatcatggctgtcggaacgatcccggctttatccaactcggcaacaatatccttacgggcttctggtttcaattggcgttcgagcaggtattcatgtccttcgaacgcaggtttgaattcggtttctccggcaaacacccgcttctcccgttccaatagttgcaatcccatataggctgctcctaaatcgccgctgacacaaatcaaatcgttttctttcgctccgttacgatagacgaccttcccgggttctccttctccgatacaggtaatgctgatagtcagccccgtcatcgaagccgatgtatctcccccgaccaaatccaccccgtagatatcgcaagcgagctgtatgccggcataaagttcttcgagattttctaccgaaaaacgtttggagacacccaacgaaacagttatctgacgcggtgtcccattcatggcatatatgtcggaaaaattaaccaccgccgatttataccccaaatgtttcaacgggacataggtaaggtcgaaatgaacaccttcgagcaataaatcggttgtaatcaacgtctgttttccttgatagtcgagcacggccgaatcatctcccaccccttttagagtagaagtgttcttcaactgtatatgcccggtcaaacgctctatcaaaccaaattcgcctaacgaggcaatttctgtacgttttatttcttccataaattataacaaagtccacaagctcatggctcatggacttcttctatttcatattaaaattgttctaccagttctttcataataaagctcattctgggttgagcttctgccgctgccttttgcacctcttcgtgagaacatttctccacaataccttctacccccaaatcggtaatcaccgaaacggcaaagacttcgataccggcatgacgcgcgacaatgacttcgggaaccgtactcatgcccacggcatcaccgcctatgatatgaaagtaacgatactcggccggggtttcgaaagtaggtccctgtgtacccacatacacaccttgctgtacttttatatgatttttttcagctatttcaagagcctttgcaatcaaacggcgagaatacgcctcgctcatatcggggaatcgtacacccaattccttataattgcgtccatgcaacggatgttcgggaaagagattgatgtggtcacggataatcataatatcgccgatggcaaaatcgggattcatacctccggctgcattcgaaacgaagagatgctctattcctagttctttcatgacacgcaccgggaaggtaacttgtttcatatcgtatccctcgtaatagtgaaaacgcccctgcatagccatgacatctttctttcccaattttccgaatatcaacttcccctgatgtccttctactgtcgacaccgggaaattgggaatctcggtataaggaatttcagtcttgtctgtaatgtggtctaccaactcgcccaacccagttcccaatataatggcggtcttaggcatcacctgaacttttgctgcgatataggcggctgtttctttaatcttttcaatcatcacgtaaatattttggtgaataatattctaaaaaatagagtaacccgaaggcaaatacaatatccctatcgattccaatgagctacaatctatttccgttcgttttacaaatatagcacaacctccggtatttcggctcccctccaaaacatttttcttaaattttcagtaaataattctttccaatatctactttttctctacctttgaataataatacctgaaaaatgaaacagtttttattttgtctaactatctctctatatggcagcatattggctgtgggacaaaccaccgggacactaacctctcataaatttcaatcaggaggaatcgagcgtagttataaatactatcagccggccaatctctcatctggggctcctcttgtctttgtacttcatggctatggtggcacagccgatccaaaaagattcggtatgaatcctatcgccgataaatacggattcgccgtgtgttatccgcaaggcgaacaagataaaaaagggaaaaactgctggaatgtcggctatccatttcaggccgatatgactatcgacgatataaactttttatgcgatctcgccttacaccttcaaaagaattaccgactaagcccgcacaatacattttgcacgggttactccaatggaggagaaatgtgctatcttttagcgtacaaacgtcccgatatatttacagcagtagctcctgttgccgggcttacgctcgaatggatgtatcgggaattagaaacaaaccgccctatccctctattcgaaatacacggaaccgaagacaaaacctctatgtggaacagagacccgaataatgaaggaggctgggggaaatatatagcagtacctatcgctgtaaaccattgggctatccaaaacagatgcactcatgaaattaccgatacgattgcctctattgattctttatccaatcatactattatcagccataaatacgtcaacggtataaacagaaacgaagtttggttatacgaaataaaagggggtaaacattcatggggagaaaaagacttgaatacaagcgaacatatttggctatttttcagcaaattcgtccgttaggatacacaaaaacaatataataattacatcaaaacaaattcatcatgttcacacaaatcaaaaattttttagtgcttctaatggttattaccattgcattcccttcggcatgtaaaacaaagtatcctccactccgaattgggaactccatcggtatcaaagacatgaactacgaacgtctcaaagcgatgaaagatgccggtatcgactgcatagaaattacaacaggtggattcatatccacgaagaaacccaaaacagatgccgaaattacggagttgttgactcgtaccaaattagcagccgactctgccggtattgaaatttggtctatacacatgcctttcggaaaagacatcgatatttcgcaaaccgacgaaaaaatacgaaaaaacagcgtcgctctacacatgaaagtactcgaattttgtaaaatcatacaacctaaaatcattcttttccacccaagctggtatctgggccacaacgagcggaatgaacgtatcgctcagttagtacgctcggtaaatgagctcaatcccaaagttaaagaactgggagccaaaatggttatagaaaatatgttaggatacgaactcgtgagaaacgaacaacatgaacgtcccttaggtcgtacagtagaagaagtcaaactcatcatgaaacaacttcctaaaaatgtatattctgccatcgacatgaatcacatcgataacccagaactgctcatacaggctatgggcaaacgattaaaatctgttcacatcgccgacggtgacggacgacacgagtgtcattacatgcctaacccttgtagcgggaaaggagacaacaattggataaaaatactaaaagagctctacaaagccggatatacagggccttttatgtatgaagtaaaaacatcggaatacaaagagttcaaagacctctataactgttatcaaaacctctatcaaaattttatcgactcaaacaaataaaaacacatacactattatgaaagatttgaaagacatattatcgcatttttttcttgccggaaaaattctcgaaattaagccattaggagcaggactcatcaacgattcttataaagtaaccaccgtcgcccccgatacccccgactatgttttacagagaatcaatcactcgatcttcaaagatgtggatatgctgcaaaataatttttaccaagtcacgactcatatccgccacaaattagaaaccaaaggagaaaccgatatagaccgcaaggttttaaccttaataccgacaaccgatggtaaattatactatttcgatggagaaagttattggagaatactcatcttcattccaaacgcaaaaagctacgaagccgtaaccccggaattctcatattatgccggacaagcattcggtaatttccaagctatgctgtcggatattccagtggaactgggtgaaacgattccagattttcacaatatggaattccgattaaaacaactgcaagaagccataacagccgatcctgtcggtcgtgtggcctccgtcaaacccatcatcgacgagctagacaaacgagccgacgccatgtgtttggccgaaagattgcatcgagaagggaaattgcccaaacgcatttgccactgcgacaccaaagtgaataacatgatgttcgatgaaaacggtcatgtattatgcgtgatcgatctcgatacagtcatgcccagctacatattttccgacttcggtgatttcatgcgaacggcagccaataccggagaagaggacgacaagaatttggacaacgtcaatttcaatatggaaatatttaaagcatttaccaaaggatacttagaaactgctaaatcgtttctcaccgacatcgaaatcgacaatctgccctatgctgttaccttgtttccttatatgcaaaccgtacgtttcctgacagactatatcaacggcgacacctattacaagataaaataccccgaacacaatttagttcgtacaaaggctcaattcaaacttctacaaagtgccgaagccgctatccccaaaatgaaggcttacatcaaagaatgtttgggtaaataaatccatactgcccaatgaaagaaaaagagctcccgaataattcgggagctctttttctttcattgaaaactccttaaaaaaattcaaaacccactctttctcctcttggttttggttacctttgcacactcaaattcgaaaccaagaatcatgaactcccccaaaggactcttctacgctatcatttcttcatcgacattcgggcttgtacccctatttgccatacctgctttacaagccggtatccccctcaactcagtagtattttatcgattcctattttcctcaatcttgctcggcattatactctgtatacgaaaaacgaacttcaaaatctcagggaaacaagccctcatcattttcgggttggcgtttttatatgcggccacttcccttcttctgacaaaatcatatctgtacattcctagcggattggctactaccctacacttcctttatcctgtactcgtaaccttactgatggttacttttttcaaagacaaagtttccgtctccatcatcattgcaacaataatggctatcggcggtgtctacttattaagcggaagcgaaggcggtacacttaattccacaggattggcattagctctcacaaccgtattgacctatgcctcttatatcgtcggaataaacaaatcgagcgtaagcgatatggacggtttaaaactcacgttctacgttttactatcgggtgcattcattttcttgttgaacttaatcgtaaatcgggaaatgcttactcccataccctcttgggaaatcggcgttgatcttattcttctggccttagtgcctacacttatatctgatctaacccttattcttgccgtccagcatgtcggttcgacgacaacggcagtattgggttgcatggaacctttaacagcagtcattatgggtgtattatttctgggtgaaagttgtaacttcatacaaagtatcggtatttgtatcatactcatcgctgtaaccactgttatcatagctcgtaatccccacgaaataaaaaagggtttgcaacttatccccaaactactgcataaatcaagagtcaagtgatagatggcgaatggggccgttttctctcacgaccgttattttcagctatctctacccaataaacacccacacaaataagaagcatagcacccaactgttcccaagagaatctatcctgtcctaccagaaatgaaacaatcgaagcgacgaccaaaattaaatacccatatatagccacgactgtcgtactcagatatttgagacctgtcggtattagtaaataactgataacagttggaaatatcaacacaaacagcaataaggcaataggccaaaaatgtagcgaaagtgtagttaaagacgcttcatatccaacaaaagccataacgataagactcgatacagccgctcctgaaaacgtataacgcataagtgtataagggcccgttcgtctcaaaaaccgattactcaatatcagatatacggcataaatcacagaactcaccaaacaaaaaagattaccagaaaaagcatccgaagccaaatcatcgctcttttgtgttgaaatacagagtagagccccacctaatcctactaaaataccgacaattttcatcactgtcgctttctcattaaaaaagaaaaccgacaaaataaaaacccaaatgggctgcatagaagtaaaaatagctgccgataccggagtcgtcttactaagtcccattaaataggaaaacatataaccataaatgccgacggcccccaacaaaaacagataaattttatcttttaccgaagccgtctccggttttgcccaataccctatgatccaaaaagccacggctgcaaaaacacaacgaaaagtcacaccggttagcggggcgatccacaaaggcaacaaatatcgtaacgcatttacgtttaatccactaaacgtttttgaaacgaccatagccaaattggcttcctgaattttatttgtcataacttttccagagatttatcactatcacaactatcattaaacaaaaacgtatggcgacgataatatgcccctaaaacgacaagcagtgttataactaaattaaatataaatgcaaactgctgagtatgaatatgaaatagagattgtaatgtatcgataatcgtaggacaaagtaagatagccaaataattcatagacatgacaaatgcgagggccaaagtcactttatcgggtgtagctactctcgttgtctgatcataaataacaggttgcatcaccccatacccaaacccgataaatatggctccaagtcccaatatccattcattgcccgacaacaatatcagaaccatacctcctgccatacacaatagactcacacattttgtaaacgatccaaaaatcgataacactcgattcaatatgaaaccgggagccataatagctaaataaaacaaagaaataataattcccgaggctcccgtgtcgaaatgatattccttcatcaaaaatggtaaattgaagctaacgataacagctaaataagttaccaggccataaaacaacatgagagaaaccaacctcttcacttctattttacccgatacagtcacctttactggggctaccgatatagtatctcgtttcaaataaaaagacaaaaagaacgataccacagggaaaaaataaacaataaaaggcaagtgccaattaatctctgccaaatatccagtcaatacagtcgccgtcactaacgttatatttgtaatcgcagaactcaaaccaaactgtcgagtacgatatcgacctataaaatggcgagaaatcaaacccgttgacaacggaactatcatacccgagccaatacccaacaacgcactcaccgctattaactgccacattcgggaagaaagcatatatagcaaaccacttaatgcaaaaataattaatccaacttgtaacaagacgatgttattaatacgttcggtcaacttcccggataacaagatgaaaggtatagtcaataacgaaggtagtgaagataacagttgtatgtcgaactccgaagaatgcggaaatattgtagacatctgtcccaaaataggggaaacagctagacccggtagtgcatttaaagctgaaatagaccatattcccaaaagcgtaatcaaaggtatagtcccttgtccagtttctattttcataatcacatcttttttatgcttgcattttcaaaaacaataatcaccttcgaatgtttaccggtactattctaatattttaataagtgccaaattgtgtatgaatagacaaatcggtcaaactttcaccttacaaggctgttgtttcatcgaagagccgtacaaaataatccggctttatagttctaactcataaaattttatacaatgaaagatttgaatttcagagaaggagatgccaagacaagtatcttcgggtccaacgaaatgttgaaaccatcaccggtagatcgtattcccgatgcacctacaacaccagagattgcataccaaatggttaaagatgaaacattcgctcaaacacaacctcgattaaatttagctacgttcgtaaccacctacatggacgactacgcaaccaaattgatgaatgaagcgatcaacatcaactatatcgatgaaacagaatatccgcgtatcgccgtcatgaatgccaaatgtataaatatcatggctaacctttggaactctcccgaagaggaaaaatggaaaagcggagctttggccataggttcttccgaagcctgtatgctcggcggtgtcgcagcatggctacgttggcgtaaaaaacgtcaggcagaagggaagcctaccgataaacccaattttgttatctcttcgggatttcaagtcgtttgggaaaagtttgcacaactttggcaaatcgagatgcgagaagttcccctgactctcgaaaaaacgactctcgacccggtagaagctttaaagatgtgcgatgagaatacaatttgcatcgttcctatcgagggcgtaacttggaccggattgaacgatgacgtcgaagctctcgacaaagccctcgacgaattcaacaaaaaaacaggatatgacattcctatccacgtagatgcagcttccggtggatttatattacctttcctcgatccacacaaaaaatgggatttcagattaaaatgggttctatcaatcagtacatcggggcacaaattcggattggtataccccggtctgggctgggtcgtttggaaagacaaaaaatacctccccgacgaaatgtcattcagtgtaaactatttaggagcgaatatcacacaagtagggctcaatttctcacgcccggcagctcaaatattgggacaatattaccaatttattcgattgggatttcaaggatacaaagccgtccaatacaatagtatgcaaataacccaatacctccacgacgaaatcggtaaaatggctccatttgtcaattacagcgatcatgttgaaaacccattgttcatctggtatatgaagcccgattacgcaaaaacggcaaaatggactctatatgacttgcaagacaaattgaaacaaggcggctggatggttccggcatatactctacccgaaaatattcaaaactatgtagtcatgcgtatcgtcgtacgtcaagggttcagcagggatatggccgacatgttgctgaacgatattcgcgatgccgtcgcatctctcgaaaaattggaatacccgaccaatactcgtatcgcacaagacaaaaatattgaagtgaaaggttcggtatttacccatacggggaaccgccataaaacaaaaaaataggaatatgaaaaaaactatttcggtttcccaaatcaaacaagcggtcaacgaagcgtacgatctctataaaaataaccaagacggtaagaatgccgactatattccctatcttgccaacatcgacaaaaacttgttcggtatcagcgtatgtctactggacggacaaattatcgaagtcggagatacccaatataaattcggtatagaatcggtttctaaggtgcacaccgccatattggtattacgccaatatggcgcagaaaagctcctttccatgattggagccgatgcgacaggattaccgttcaattcgataatcgctattttgttggaaaacgatcacccctcgaccccattggttaatgccggagctatcaccgcatgcagtatggttcaaccagttggtaatccaaaagaaaaatgggctgcgatagtgaaaaatatcactgaactttcgggaagtgctcctgaattgatagatgaattgtatcgctccgaatcggctacaaatttcaacaaccgctcaattacatggttattgaaaaactacaaccgtatttatgacgatcccgatctgtcgctcgacctttatactcgtcaatgctctttgggaatcacggcagaacagctttctgtatgcggtgcgaccatagccaataaaggagtcaacccaaaaaccggagcaagagtattcgatgcctcgctgtctcctcaaattacatcgctgatagcgacagtaggattttacgaacacaccggagactggctcttcacttcgggaattcctgcaaaaaccggagtaggcggaggtgtcatgggagttcttcccggaatcatgggtattgcagcctttgcaccccctatcgatgcagcaggcaactcggttaaggctcaactggcaatcaaacatattatgaataaactcgacctgtcggtattcagtggcgatcaggttaatgtccagtaaaaacatctctcatagcaaaaagaaacccagatagagtaaactatttgggtttctttttgctatctttgttcaatattttttccatattatccatatctttactgaaaattcacataacatgaaaaacaaaatgatccaaaaaataggtttagccattactacatctcttttatcttggaatatttcattcgcacagacaatcgacagttatataccatcgcaaaagaatatcgaagctcgaaaagaatttcaagacaacaaattcggaatcttcatacactggggcatttacagcatgttggcacaaggagaatggtacatgaccaatcacaacatcgactggcgagaatatgaaaaattggcatcaggattttatccgtctcggttcaacgcagccgagtgggtatcggcaatcaaggcctcaggggcaaaatacatttgtattaccagccgacaccatgatggattttctatgtttcacacccaacagtccgactttaatatcgtagatgcgacaccttttaaacgcgatattttaaaagaattggccgatgaatgccacaaacaagacattaagctccatttgtattattctcatatagactggcgtagagaagattacccggccggaggcaataccggaaaaggaaccggtcgtcccaatggacacggagattggcccagttattatcggttcatgaataaccagcttacagaactactaaccaattatgggccgatcggagctatatggttcgacggagtatgggaccgtccctccaatttcgattggcaactaaaagagcaatatgatttgatacacaagctacaaccggcatgcctcattgggaataatcaccaccgagacgtatatgcaggagaagatatacaaatcttcgaaagagacgtccccggtgaaaacacagcaggctattctactcaggcaataagcgccctcccattagagacctgtcaaactatgaatggtatgtgggggtataaaatcactgaccaaaattacaaatctactaaggctctgattcattatctcgttcgcacagccggacgaaatgctaacttgttattaaatataggtccgcagcccaatggagagctcccggctttggcaatagaccgtttaaatggtatgggtaagtggctatcggaatacggcgaaaccatttacgacaccagaggtggcgatattcccccacatagctggggagtatccactcgaaaagggaatcgcctctttatccatattttggacttgaaagaaaatggactctatataccactgaaagccccaataaaaaaggcaatgaaattttcaaatcaagctcccatcgaattcaaacaagataaagacggtacattattgaaatatccccaaataccgaacgaaatcgactacatcgtagagcttgtactaaaatagcacaaaatcaacgaaaaggacgatgctaaaacctatacctaccggcctacggtttttgtgtctccttatcttgtgcattgaatttttgcaataggctcgtcacatagaccgtaaaaatagggaacatcatcatacccaatgcagccaaaacgaccgaaagaatctttccggtagcggtaacggcatagatgttcgaacctactgtcgtcacgtccataaaagcccaccacaaagcatcggtataccgagtaaccattggattaaccgcatgttctaaaacaaaaaatataagactcgaaaagtaaactgtcgccataagcatggtaacatacgaaataaacaagctcgatattttattataggataaccaccctaccacgatagccaaagcatatccgcttctcactaacggaataaaccgaagaaaataataagtctcggaagaaaaatttaaattcaaataggaaaatatattcaaataaggtatcgatacgagaaaaaagataaatcggtttctaagatatttccatttatgatcggataaaacaaattccaacaaaaaatcgaacataaagaaactgcatatccataattgtatttccatataattcccttgattcaagaaagatatgttacgaaatgtatctatcgatatggttataatcagaaaaaccgataacaataaaatcaatatgtgcaatatgccataaattctcgactcataatttctccaccccccgattatattttttcccatttttctttcctcataaattatgcgacgataaaacaacaagcgaccgacgtttgtttatctacacgaatgtagatgctcctattagtaaacttaatatcaacaaatatggcaaacatcggaaaatcagtaaaattaggcgtatttacgcttgcaattatgaatgtaacggctgtcgtatccctccggggactacctgccgaagctgaatatggagtcagttcagcgttctattatctattcgcagccttagtattcctcattcctacggcgctagtcgcagccgaactggctgccatgtttcaagacaagcaaggcggagtctttcgttgggtaggagaagcattcggtaaaaaagccggattccttgccatttggttacaatggatagaaagtactatttggtatcctaccgtactaaccttcggagctgtcgccatagcatttataggcatggatcatacaggggacatgttattggcttccaaccgtttctacacattagcggtcgtactattcatttattggctagcgacattcatctcattgaaaggtttaggctgggtaggaaaagtcgccaaaataggcggtttggtcggtacaatcattcccgccggacttttagtcattttggcaattgtatatctactaatgggaggtaaatcccaaatggatttttcaggcaacttcctccccgatttcaccaatttcgacaatctcgttttagccgccagtatcttcttattctatgccggaatggagatgggcggtatacacgtaaaagatataaataatccgtctaaaaattatcccaaagccgttttcataggctccgccattacagtcctaatctttgttttaggtacattcgccctcgggatcattattcctcaaaaagatatcaacctaacacaaagtcttttagtcggattcgacaactatttcaactttattaaagcgtcttggttatcccccataatagccatagctcttgcattcggtgttttagccggagtactgacttgggtagccggtccgtcaaaaggaatcttcgcagtaggccgtgccggataccttcctccttttttccaaaaaaccaataaaataggagtacagaaaaatattctttatttacaaggaggtgcagttacattattaagtctattattcgttattatgccttcggtacaaagtttttaccaaatcatgtctcagttaacggtagttctttatctgattatgtatatgttaatgttctctgccgcaatttatctacgatacaatatgaaaaaaaccaatcgcccattccgaataggaaacaaaggaaacggattaatgtggttcataggaggattgggattctgcggttcgcttcttgccttcgttctaagttttattcctcctagtcaaatatcggtcggcagtaatgccgtatggttttctgttctcattataggagccctgatagtcgttatcgcgccatttattatttattcatctcgcaaacccagttggacaaacagcgacagccaattcgaaccattccattgggaagaaaccacaccgaacacaccaacttcaagcccggcaaatgaatcgaatgaaacctctcccggtaaataatctcatacaaatacaaacaaaaaagctgacacgattttacgtgtctgcttttttttgtcgatagtaaaatataattactccgccggcttaacattccatacgaacaaagctaaaacgaatgataaaatcgaagcccctatccagaaaatagaaaccggtaaaaaatcatacgtcacaacaccgtcggatacaaccttaaaattctctattagtgtacccgatatcacatcttgtaaaccggctgcaatataactcgccataccaacgacacccaatgccgcaccggtcgcattacgaggaacaatatcgacagccatcaaccctcccaagaaacaaatcagcaccccgatagcaataccaaaaagaatcatacttatcacattgagtacaaggctatctcctcccaacaggaataaggtcaatgcaatcgtattgagcacaccgaaaataaaagccggcatatttcttttccccttgaaaaatttatcggaaaaccagccagaaagcacagttccgaatattcctaacagagcatttataccaatcaccgtagttgccaattccaacgaataccctttttccatctccaagaaacgtactccccaactgttcaccgcatatcggctaacatacataaacgcactggccaatgccaaaatccagacgtacggattcttcaatactcctttctgagccttattggtcgattctttcggcggatttcctacatgaggaagccctctactttccggactatcatgtaaaaagaaaataataataacgactcctattgcacctgctataaaagaaccgacaaaaccggcttgccacccgagccaacctacgacagacccaacgaatataaaagataaaaactctcctaaattatgactagcactgaaaaatccataataagttcctcgctctttcggcggaaaccagcgagataatgcaataatggcaggaccagcccccatcgattgagaccaaccgtttatcgcccacataataaaaaagcagacaaaaaacgccatagacgatagcccggctaacccactcgtcatacctaataaccctacaataaggttagcgaccgacgagacaattagtccggttgccataaatcgcttaatattagagtggtcagccataaaactattgacaaattttccaatagcatacgcaaaaaggagagccgaaccgacaatacccaattgctgatcattcaacattccgctttcaacgataggtgtctttaccacatttagtcccgtacggcaaacataataaaggctataccccaatgtcccggcaaaaaaactttgtagtctcaatttctttgtcagcttcacagcctcttcatcagttaatgacacgggcctttctgccggaggtaaagcccgataaaagtcaataattttttttagcatctttctttatttttgaattagatttaatcgcgtgtttcgttctatattgtttttgtttcgtttcgtatgcaaatgtaatgaaaaaatgaactataaaaatattttttacctattaatatactcacattcccgaaaggtagagaaacagtaatgtaaacatataatttcccctttatacttttcacccacaaagaactttcatcactacatatttgttattattcaaaacagtaatcatgaaattaaaacgtatagaagcaatatttaccccaccggcatctcacatggtcggcgacggattcaaagtacaccaattcattcctagtgtaaaggggctggacatgaagcgtatggacccattcctgatgctcgactacaatgccaaacagcatgtcgaagcaagttcgaaacccaaaggtgtaggagttcaccctcataggggattcgaaaccgtaaccttagcctacaaaggccggatcgcccaccacgatagcgccggaaatgcaggaattatcggtgaaggtgatgttcaatggatgacagcggcttcgggagtcctccataaggaatattacgaagaagaatgggctcgggaaggaggtgattttcaaatggtacaactatgggtaaacctgccacggaagtacaaagaagagaaacctcgttatcaagccttagcgtccaatgatttcgaacgagtctatctatcggggaataatagctatatagaaataatcgccggagaatatgcaggaaaaaaaggaaaggcaatgacattctctccgattcatttaatgaatgcccgactcacacaaggtgataaagccgaattttccttccccaaagattatacaacctttttattagtcatcgaagggaacatctatataaatgaatctatcgatgtaaaagcagaccatttattgctatttgcatacgaaggagaagcattctcaatcactgcatcgaaaaatagcgttgtattaatagtttcaggagagcccttaaaagaatctatcgcagcatacgggccattcgtaatgaacacacaaaaagaattgattcaagccttcgaagatttcaacaagggtaaatatggtatattgaacgactaaaaatatcaactatggcaaaagtaaagaaaaagagtacaaagaaaaaaaacgacgagtcgtctatttactccggtgtagctatcaatatagccgacgattgcaaaacgagtaaaaaaatggtcaaagattggactaaaatcatgaacaacaatgccaactcgtctcctttgtacaatgatccgcaagagaaaaacaaatagaaagataaatttttctctttcccgataattttacagttattttcatacctttgaggaaacagacagattttatctataatcctcaaatcgtatgagtatgaatacacgtctgctcctcataacctttttatgcgtattctctattggacaatgcattgcccaaacatggtacacaggtaaagacaactttcgtcaggcaattttccaagacagtattctatccgattacaattatcaagccgaaaaagatatcgtcaacgtaaccgaaaccgatatacacccgggagaagggtttcgtccttctttatcgttggacattgccaatcgaaataatcgggaaaacaaaaaatatccggtatatcggcaaagccaaacagggacaatcacaaaagccggatatgtagaaaaaactgtatggggagtggtatggggatatggcgactcttcaaatttccacgcattgcttctccgagccggcaacccggatccatacggctaccatattcccgaattacaatacagcatcatcactgttgccgagggagatacaatcttccatgcgccgtggaatacattgtcttccccatatatcaatcccgaaacagattacaaccgcatacacgttgttcccgttaacggaggatacgaaatattcatcggaaaagagcgggaatgccgcataggaatctgccacgacgacagactcttcggaagttcggcaggagtctatataggaagcggagcgaaaataaaaatgaaaaactggtccctttctccggttgaatatatagagcgaaaagtctttctgacagccgacaaattatatgaatatttgaatataagcacaaacgaaattgaaggtttttacgaacctctacaatccgtttctgcctcggacaatattcgattaggcgggaattatcaactcgctgcaatttctacccaacagcatattctgctcctttacgtcaatggagcacaaagattccaagatcaatgggaaaccggtatgatcaaagcaattttaaaacctaccgggcttgtgaacatcttcaatgtcacttggtttgatgctgaacataaaccattgaaagatggcgtaaaagcggtcatattgtccaatcatatcatttctatctatttcgataaagaaggtgtgacactaaaatgggcacaaaccggcaataagaaagaattcgacactccttttcattattccatgtatcgagatatactctacaatactacactcataccgtctttctttatctcttcattgtaaatattatccgaaaaaagaagccaaaggtgcaacagtatcaaaaaacgaatattgttgaaatgaataaaaaaacttgcatatcattcactttttttataaaaacaggtatactccaaagtgctctattctttatataatatttaaaaatcaacacattacaaataatccgcatctttttcccatttaaattttattaatttgcaggtcgatatcgccgtatcatcattttcatgacaacaagtagtgttgctaccgggcgataaaaattactcgacgaaaacgcttcgccatatttaaagttcagaacaggcggacaactctgcgttttcttcttttattatgcccgatcggagttggcgggcaacgaacattaaattcagccttatgaaaaaaacatcttacttgatggtaggaaccatcctactcgcaaatgtcctcaatgtttccgcacaaggaacaaccagaaaaataatcacagagaaaaaaacttctcagggacgtatggtcgatccccaatccgaggttatcactgcaccccaaatcgccgaattagaagtaagccaaacaaaatgcgacactacattccgattcgaccatgacggtactgtcgaccttcaaaatgccagagcattagcactgtcggcctttcaaaaacatcatgacgcagacatcattgtcggtgctttgatgaacacccgtatgactgcccaatatatcgaagtaaacatcgaaggattccctgctcgttatagcaaaatacgtcctgctacacgggaagacttgtggatgctcgactttatcaactacggaaacaaaagtaaaaatactgacgccataaaaaaataacgattctttcaccctcacagaataatacattgcatcatgaaaaaattactcttcctttcattctgtctgatatggctccctctgttttcttcggctcaaatcattcaaggagaatcgactactactcaaacattattcgttcctgaaaagaaaattcccgaaaaaggatatccccgctatcaaggagacatctacttaggttacgcaggtgacgatatctgcctctctttaacgacaactcacggcatacgtattaacaaatacctgtttgccggagcgggaatcggtatagaatacggcgacctgtggttttatcacgacagatataaagattggctatgtgagacctccaatatacctttattcatcaacttaaaaggatactatccagtagctaaaaagatagaaccatacgtcagtttatccctcggttatgcatacaatatagacgaatactccggattctattgcgatgccagtataggaatacgactatggaaattttgcgtgggtataggattcatacaccatgaatgcacaggattaaccggtgaagactattataacaatacttttgaagatgaactatggacaagaaataagttccaagttaaaataggattccagtggtagaactcaacgaaagttaaaaagtagacgactgtttgagtaaattcaaacagtcgtctacttttctatacatttaccaaataaagacccttaatatgaacgggcgaacaaaacccgacgagccgaaggttttccggtaaccatgcaaacacccggagtcgtatcgccatcgaacgggatacagcgaatcgtcgctttcgtctcttccttaatacgttcctccgtttcggtggttccgtcccagtgagcgagaataaagccaccttcctcgattttctctttaaactcatcatagctgtcgactgtaatcgtatgttcctgacgatatttaagagccttttggaaaatattagcttgtatctcgtcgagcaatgtttttaccacctgctctatattctcgacagacatggtctccttctccaacgtatcgcggcgcatcacctcgacagttccgttttcgagatcacggccacccataaccaaacgtacaggtactccctttaactcataatcggcaaacttgaatcccggacgcttgttatcggcattgtcatattttacggatattcccataactcgcagcttatcggcaatttcgtttgccttcgcatcgatagcttgcaactgctctgcattcttatagataggaataataaccacctgtataggagccaacttcggtggcaataccaacccgttatcatcggaatgggtcatgataagtgcacccatcaaacgagtagaaacgccccaagaggtagcccatacgtattcgagttcattattcttattgataaactgaacgtcgaaggccttagcaaagttctgtcccaagaaatgagaagttcccgactgcaacgcttttccatcttgcatcatcgcctcgatcgtataagtatcgagagcacctgcaaatcgctcgttggccgacttgacacctttcactaccggtacagccataaaattctcggcaaaatcggcataaacatcaagcattcgacgagcttcggtttcggcttcttcacgagtagcatgtgccgtgtgtccctcttgccacaaaaattcggcagtgcgcaaaaacaggcgggtgcgcatttcccaacggaacacgtttgcccactgattacacaaaataggtaaatcgcgataggattgtatccagttcttataagtattccaaataattgtttcagaagtaggacggataatcaattcctcttccaatttagcagacgggtctacgaccacgcccgaaccgtcggctgcattttttaaccggtagtgtgtaaccacggcgcattctttggcaaatccttcgacatgctcggcttcccggctcaaaaacgacttgggtatcaacaacgggaaataagcatttacatgtcctgtcgccttaaacatatcgtcgagctgacgttgcattttttcccaaatcgcatatccatagggctttattaccatgcacccccgtactgccgattgctccgctaaatcggctttcacaaccaagtcgttgtaccactgagaataattatcggcacgcttggtcaaatctttcaactcttttgccattattttatgctgttaatttattacacaagaatttttatatcctctattctacattttcgtgcaaaaatagagaaaaagccgataagttaaaaacaaattcctgtgaaacaacgagagctatcgtttatccaattctccccgacgagccatgtctaccattttctctcccggaatcaaatatatatcgaggcgacgattccgtgcccgtccttccaaagtttcattcgaagcgatcggatcgaacgcaccggcttcataaataacgacaaaatccgtatttcctccatttcgcgtaaaccaatctcgaacagcatgagcacgggctcgggtcaaatcaagactataagcctccgaacctgtatcgtcactatgcatcaccaacatgacatgatagaaatcgggtactcgcaaagcggccaaaaaaggtcgcaaataaatgtcggccctatcgctcaacacagtatcgttcggtaaaaaaagattcgaagccgataaggtcgctttaagaacttcataattacgaattaacttcaaatcggacaaccgagctttttgcaaacgtttcatttccctagattgggcagtccgtatcttacgagcctgtttgcctaaatctggaatagaaagattttcatcgagagtcaactgcgtaatatctatatgtcccgttttatcggaagctcgctccttttccccacccgaaaaccaagaagatattttattcgcagctttctgaaaaatattctgtgaagaaacacctaccggggaaaaacatataacgaccgccaataatataaatacgatttttctcatagaaccctaatcaaaaaacgcccaaagactcttcataatccaattctccccgaaccagaaacggcatatcctcgtcttctattttcaccccgtctttacgtgcgcttttacaagcaaaagcaataatgtcctcttcatcaagttctacttcttctccggcctgctcgtcgaacaaccccttttgatcgtagtaatcatacacaacatcggtaacatagataatatcgtcatgggtatatttttccttcaactcttgcggcaatacatttaatatatatcgaacagcatcgtcttcgtcgtatgcaaacaaatcttcttcctgactcatagcttcatttttttattgggtaaaagtacaaatccaaaatgtcttttgcaaatcgatgaaaaaaaaataagtttttttgttgctataaaaaaaatattatctacatttgcagtgtactattaaactaatacacacaaacagcataacactacaaattgtaaacgccatgttacaaattgaaaatcttgaatttagttatcacaaaaaagggaaccctatcttcaatgggataaacctgactatacagcccggctcggtttacgggctcttagggaagaacgggatcgggaaatcgacccttctttacatgatgtgcggattgatgtttcctcacaaaggttctatccggttcgacgggattgaagtaaaacgccgattacccgaaaccttagagaaaattttccttgtgcccgaagaattcgatctcccttccatatcaatcgacgattatgtccgtcggaacagtgtgttttatcccaacttcaacatcgatcaattcaatcaatatctttccgattttgagttagaaaacacaaaaaatctagccaaaacttctatgggacaaaagaaaaaatatttggtcagtttcgctcttgcgacaaacacacctttattactcatggacgaaccgaccaacggtatggacattccttcaaaaagccaattccgtaaagtcattgcatcgggtatgaacgagcaaaaaagcatagtcatatctacccatcaagtacgcgacttagaaaacatgatcgatcacatcaccatactcgacaacggacttctactactcgatgccgatacccacacgataagctctcgacttcggttcattaaaggaggcaacgaaagtgagattgccggtgcattctataaagtatcgactatcgcgggatatagtgctatattgcccaatgaaaccgatgaagagtcgctaatcgatattgaaatgctcttcaactgtacaataggtgaccccgaagtaattcataatatattcaattcctccgcaaaataatacgaacatgaaagaaaccgatatcatcgatcccgtacgaatcgggaaattcagtttaggctatttcagatggtctgtgacggcccatatattccaacccaaacgtttttggaaatattgcaccaaacaagtatatgaatggaaaagaggactctccctgcaatttatatccttgaccggcatttatacattattgatgtttattttccatacggacggccagccgttcattacatcaagcggtgcacaaatgcttatttggttcggatttttcatctacatcgccaaaagcagttcaagtctcgccgaccaaatagggatacgttctaaacgagtagtctatcttaccgttccggtatcgacagccgaaaaatatatcgcacatctattgtcgaccattgtcctatatcctttactatttttcgcagccattgtcgtagcccaatatgcatcggagctaatatcttctaccataagaggcgaaatgttcaatccgggaacacctttgcaggattgcttctcgatgtggaaaaacagtgggtttaccacgatattctttgttacctccgtacttagcacaatcgcgacattcacactcggcgccacattgtggcagaagaacagcttcttgaaaacggtatcggctctttttcttttttctattgtattttcattttcttgctccttatttctgacaaatgaagaaatcggctcagccgtttcctacctttttataggaaaatttttcgataacagctcaaatttcttttggcttataaataccgtccaaatcgccgagacaattattttaggatacatcggatatttgagaatgaaagaattggaaataaatgaaaccaaacgatagccatgcaattcaaagagaaccaaaccatctacttacaaatagccgaacgaatcagcgacgagattctgttagggcactatgccatcgggagccgcataccttcggtacgcgaatatgccgcactcgtggaagtgaatgccaacacggtcatgcgctcttatgaattcttgcagacccagagcatcatcttcaacaaacgaggcatagggttcttcgtttcgcccgatgccaaaataaaaataaagagctaccgccgtaacgagttccttaaaaacgaattacaacgtttcttcatacagatatatacactcaacatttctatggaagaaatcgatctcatgtataaacaattcatcgataaattaaattccaaaacatcaaacgcacaattatgaaacgctctactattatactgattattttcctcgtcttgctaataatcactcctatcgtaatcgtaaaaacggtcaacaacctatctcccgaatcaaagcttaaaggcatacagaccctatggaataaatcagatccgaatacccctacccgatatatcattaccgaagaatatttcgggagcgacagtatcggcactacaatcaatattacgaccgatgccgattctaaatcgacccttatcgacaatcacagatacgacgaagatacgattcgtatatcgggaaacgcccatagtagttacaatatcatttatgaggaagaagtaaatctaattatcgaaaacaaaaatccgaacataaaattcaagatcgcaaatgccaatctcagtaagatcagtctcaattcctcgggcgaaacagatatcgtctcatcaaacttagggaccttaatattccaagacagcataaataccgctcctatccgcctccttcaaaataacatcggtggactgattgcattgagctgcacaaaccgtccgatggaaataaccgagaacaacataggcacagccatttttccagaaaaatacagagatttctctctcgtcaacaataatatcggtgttaacacatggtccaatgaatataatataaccataggttccgaaacgaataacgacagtgcagaaactcatggaacgttcaaaatgaaaatcaatgtcaaaaccgacgaataatacaaatcatttcactaaaccacaatacattttatcaggtaaaaaatgaaaagagttttcaaattaggtatattattgggatttatattctcattatgtactgcggcacaagcagccactaccgcttgtaaaataaacggggttgttaccgattcgattagcggagaagctattccgtttgtcaccatagggatagagaacaacgaaggaaaagtattgagccgaattgcttcggacgcactagggaagtttatgatcacagcttcgacgggtcaaaattaccgtctggtcgtctcatcggttggctacggaacaaaatacgtcgatatatcactttcggaaaatgaaaaaaataaagatttaggaaccataaaacttacagaaagttcagagttatccgaggtaacagtcgtcgctcaaaaacctttaataaaaagcgacatcgataaaatcacttacgatatggaagccgatccagacgccgccagcaacaatgcactggatatgctgaggaaggttcccatgattacagtcgatgccgaagaaaatatacggttgaacggacaaagcaactataaagtattggtcaatgggaaaagttcggcagtaatgtcgggagacaatgtcaaagaagttctcaaaagtatgccggccaatacgattaaaaatatcgaagttatcacgaatccctcttccaaatacgaggccgaaggtgtaggcggtatcatcaacatcatcacagtttcccgccgggaaaccaacggtatcgtaggtagtgtaggtgcaaatgccgacacctatggaggcttcgggggaaacgtctatctctcttcccaaatcgggaaattcgctttctccggcagatactccggaagccgttataccaacggcgacggaggtcactcgaaagcttttatggagacgtttgccaacgatgaattttaccgctccgaagtatatggttcttccaaatatcggggagccggacataacatgtccatcgaagccagttatgaaatagacacgcttaacctcatcagtttctcggcatggggctggttgggaaacaacaaatcgacaaatgacttgaatcaaacttatttcaatcgctccaatgctcccagcagtcaatatcgttcgttaggaagttccagcagcgactacggttctgtatcggggactctcgactaccaacgctctttcgcaaaaaaagaccgcacgctaacagcctcgtatcaattcgagtacaatcccaacaactcggactacacgaccgaaaatcagggaattcttcattcagaaaactacatcgaaaaaagtaaaaacaaagctcacggaaccgaacaaaccatacagatagactatttcgaccccttgaccgatatgcatcaaatcgagggcggggtaaaatacatcatgcgctgtaacgtaagcgatggagatagagacaaaagcatttgggacgaaacaaccgaggattggaaacaaacaccgctcccggtcaacgatctcgactatacacaacatatcttaggcgtctatgccggatatgtactaaaagttaagaaatggagcgggaaagtaggagcccgattagaatcgacttggaacgatggccgcactacaaattacgacatcacggaaacaccccaaaaaacaaagttcgataacaattttttcaacattgtaccttacgtcaccctatcgtggcaaccccgagatatgcaaacattcaaattatcctatactcaaaggcttagtaggcccggaatttggcagctaaatccgttcaaagacagttcgacccccatgcaactggtatatggtaaccctaatttggaatcggaaatatcacatacattctccttaggatacacattgtttacggcaaaaggactaaacttagccaccgaactgaatggacgcatacaaaacaatgggatagagcagactatcttcatggacgaagacggtgtggccaacgtaacttacgacaatatcggaaaagccagagaatgtaacttgaacgtatttttttcgggaaatatcattcctaccctcagcctctacaccaacctctccgggggatatggagattatagctccaaatcggcaggatattcaaacaaaggttggaattacaacggatacctcggcgcacgttggaacgcatggaaagacggtgcaataagtgccaacgtcggctactactccggatttcgcatgctggtaggaacatctgcaccaatggcattttgcgggttcagtgtcagccaatcattttttgaaaagaaacttcaactgaacctttcggtaagcgatcccttttcaaaagaacgcaaatttaccatgcacattaaaaacgatgcatatcgtatcgataactacaactacgatccttgtcaatacgtacgcttaggagtcacctatcgtttcgggcaaatgaaagaatcagttaagaaagctcgacgcagtatcaccaacgacgatgtaaaaagcgaaagcagtggtggggccggcggtatgggaggcggggccaatattcaatagactcttttgacttcctgatttaaataaacgaaaaaagccccgggctcgtgagaatccggggctttttatcttattatcaacaagcgataagttataccaactgcttcttatatgttctcaattcttgcttaattcgatatattctcaccttcaccgtccccaaaggcatttgtaaacggtcggctatttcgtcataacgatatccttgcaagtataaaccaaaaaggatacgattatcaatagacaacaaatccataatacgttgaacatcgattgtagaaaaagaatcttcaccttctattccaccttgcatatcatcggtatccggtatctcaaaatcggtaggaagagattcttgccgagacgaatggcgacgacaattcaagaaaagattacgcataatagtatataaccaacttttaatacttccggaatcatcatacatcgctttattgctcaacgctttaagcgatgtttcttgcaataggtctttcgcctcgtcttcattatgagtcagacttttggcaaagcctaacagagcattttgcagttttaccacatgctgctcaaaatcttcttgaatcattattatatctgaaaattaaaaaataatttagtaaagataaggattaatttttataataaaaaatttaaactgcctttctttactaatacgctcgaaagcgaggttacttaggagccttcttatatagcacgatcgctattaccgtatagatgatattgggtatccacatcgccaacataggtgaagtagcccccgataccgcaaaggtagaggtcacagtcgagaataatatatatgagaaacttaacagcaaacctataccgatattgatacccatacccccttttaccttccgggaagacaacgacataccgatagctgtcaagataaatgccgcggcagccatagcgaaacgccgctcatattctatctcaaaattttttatattggcgacccctctctctttttgacggataatataacgccgtagttcgggagtagtcatcacttcgctatcgttctgcgaaatcaagaaatccgaaggttctatgggtacaatcgtatcgagcgtcgacccttttatcaattcctcccgcataccgttgaaattacgaatcacataattgttaacccgccagtgataagccgaatcgtaatgaatggtttgagcagtcaatcgggattgaagaactttcttgtcgaacttctccaaagaaaaacgatagccggttttgttactattgtcatagcgcgatatataggctattacccccggctctacctgcaactgaatattactggcataatctacccgcttatttttgacatacgtattcatatactcgatacgagtcacattggccggtggtattacatagcaactcaaatagagattcaatgcagcgataatggctgccgaaaccatataaggcacaaacaatcgcttgaaactgataccgctcgacaacatggctataacctcggagttgtcggccagcttggaggtaaaaaatataacagcgataaaagtaaacagaggactaaacagattggcaaaatagggaagaaaattgaaaaaatagtcgaatatcgtcgccgacaaaggtgctttcaaaaatgaatccaatttctcgttaatatcgaacatgaccgtaatagcgagaatcaaagctatcgcgaaaaagtaagttcccaagaacttcttgataatatagatatctatttttttcaatatcttcatctcgtccctctttacaatcgtgtagtcacccggcatatcatctcgtctttccacgacttaaatgtaccggctaaaatttgacaacgtgcctcctgagtaagccaaacataaaatgccagattatgtatcgaggctatctgcatggccagtatttcttcactaatgaataaatggcgcaaataggctttactgtaacatgtatcgacataagaagttccctccgggtcaagaggagaaaaatcatcggcccactttttattccgcatattcatgataccgttacgggtaaacagcataccattacgcccattgcgagtaggcatcacacagtcgaacatatcgacaccccgctctataccttccaatatattggccggtgtccccacccccattagataacgtggtttatcctgaggcaagacctcgttgacaacctctatcatctcatacattttttccgtaggttcacccaccgccaatccgccgatggcattaccgtcagctcccaaatcggcgacatgcttcgcggcctctatacgcaaatcgggatagacacagccttgtacaatcgggaaaaaagtttgcttataaccatacaaaccctccgtttcgcaaaagtgtttccacccccggtcgagccaacggcgtgtcaaggccaatgatttcttggcatagtcgtaatcggcatcgcccggagtacactcgtcgagcgccatcataatatccgctccgataatacgttgggtatctaccacattttcgggagtaaaaagatgtttcgagccatcaatatgcgaacgaaagtgagccccctcttctgtcagtttccgacggtcggacaaagaaaaaacctgaaaccccccactatcggtaagaataggacgttcccaaccgttaaaccggtgcagtccaccggcctgacgcaatatatccaatcccggacgtaaatacagatgataggtattccccaagattatttgtgccttaatatcgtccctcaactcgcgctgatgcacggccttgaccgaggccaccgttcccacaggcataaatataggggtctgtatcttcccatgatcggtcgttatcactccggccctagcatgggtacactcatcggtatgtaccagttcaaaatccattgtccgtcctttttactcgaaaaaataacacaaatgaaaaaacagaaaaactgattgacaacatctgctcgaaaaaactcaaaacagtttctttactttattcgggaacaaagataatgcaaggcgaatatagaacaaaatttattttagctctgttgggtcatgcctgtcttggactgtcgtcaaaaaaatgcgaactgctgtcagaagcaaatgatggacaaaatcaaataaacttgattttcactaaaaacgacaagacacaccgataaacataaaaaacattaaaaagaattacttcgatatctttatcctacggagtatttacaaatacgtttatataatattatatcggttaatttctttttaaacatcgagtagtttatcaaatagaagatatatttgcagctgttatgctgacgcctcgaacgataatagtttttttatgttggacatgcgggctgtcttttttctgccacaccgcatatgcccaatcttccacgcctcctcccatgcggccgggcaatgggtcggaattggaaataaaaggaggtgaattgtcgtggccccgtaccgaacagctaccctcttctacacccaacgatcggttcatgcagaaaaagctgaacgagcacctcgaatctgcatctttaaacatcatgcgtccctcaaccatgtttcccgaaaatccatcggaattcatgttaaacgtaattttactgcacgcagtgaaagacagcatagccagccttcacgacgaaacaatcgcgcgaatggtcgatatgtttgtattacgtaacttgttacggcctctctccaatgacaaacccgctcctgtcaacagctggtcgatgagtgcacccaacaccatgcctttcggtataggcgtctcttatgtgggactcctcgaccctgtcgaaatataccgtaactggcaacgcaagaaaagggccctacgcaccaaaatggttttaatgacccttttcgggaacactacccgcccgctcaccaaacatgagactgattcaataaaacgaagcatcgaatggaaacgtaatgtcccggtaagtacgattgccaatcccgttcagatatccaccttactgaaaaacgataccatcgtcgaaccttccaagccgaaatttacagcaccgctctttggaaaagagcgtccccaaatggctatcgataccatctccgcagcatcttcaccgaaaataaacgagacccgatagcctctgttccttcgaactttctatgctgcatccgtgttgtaaaaaataaacaagtcattttgtcagaaacaaaaagaattataaatgaacttcttatagatccgaacctttccaacgtatcggaaatatagacattatgtcatattaacaaattgattttcagacaatatttcattaaaacacggctggcatttcttttgactatatcccaatgtaaaaacaaaaaaagataaaatagaaaggagaataaatatatgaatttcgacaatttcacaatcaaatcgcaggaggctatccaaaaggctgtggagattgttcgtaatcacaacgaacaatccatagaaccggtacaccttctaaaaggtatcttgcaagtaggcgaaagcctcacctcatacctttttcaaaaattgggagtcaacgcagggttgctaaacaaccaagtcgacagagaaatagaatcgcttccgaaagtgaacggaggtgagccctatctgagtcgggaagctaacgatgccctacaaaaagcaatcgactattccaataaactcggagaccagttcgtagcattggaagccatgctcatgggattattcctcgtgaaaagtccggcctctgcattcatgaaagatgcaggcataaccgaaaaagaactgggcgcagctatcgacgaattgcgaaaagggaagaaagtaaccgcagcttcggccgaagacacctacaatgcattgagcaaatatgcaatcaatttgaacgaacgtgcccgtaacgggaaactcgaccctgttatcggacgagacgaagaaatcagacgagtattacaaattctgagtcgccgaaccaaaaacaatcctatcttgataggtgaaccgggtacaggtaaaacagccatagccgaaggactagcgcatcgtatcgtacgcggagacgttcccgagaacctaaaaagcaaacaaatcttttctctcgacatgggagctttggttgccggagccaaatacaaaggagaatttgaagaaaggttgaaatcggtagtcaacgaagtcattcaaagcgagggagaaattatcctctttatcgacgagatacacacgttggtgggagccggtaaaggcgacggagcaatggatgctgccaatattctgaaaccggctttggcaagaggagaattgaggtctatcggcgctaccacgctcgacgaatatcaaaaatattttgaaaaggacaaagctctcgaacgtaggttccaaatcgtcatggtcgacgaacccgacgaaatgagctctatctcaattttgagaggtctgaaagagcggtatgaaaatcaccataaagtgaggattaaagacgatgctatcatagcagccgtacaattatccgaacgatatataacagaccgattcctacccgataaagccatagacttgatggacgaagcggcagcaaaactgcgcatagaagtagattcggttcccgaggctttggacgaaatatcccgacgaatcaaacaattggaaatcgaacgcgaagctatcaaacgtgaaaacgataccgaaaagctgcaacagttagccaaagaaattgccgacctgaaagaagaggaaactaaattcagagccaaatggcaatcggaaaaagaactggttaaccgcatacagcaaaacaaaatcgacatcgagaacttacgtttcgaagccgataaagccgaacgagagggcgattatggtaaagtagccgaaatacggtatgccaagatcaaacaaaaagaagacgaaatccatgccacgcaacaaaagctacacgagttgcaaggtgacaaagctatgattaaggaagaagtcgatgccgaggacatcgccgatgtcgtatctcgctggacgggcattccggtaaacaaaatgatgcaaagcgaaaaagacaaactgctccacctcgaagaggaactgcacaaacgagttgtaggtcaaaacgaggccatcactgccattgccgatgctgttcgtcggagtcgtgccggattgaatgatcctcgtaggcctatcgggtcgttcatcttcctcggtacgaccggtgtgggtaaaaccgagttagcgaaagctcttgccgaatatctgtttgacgacgagaacatgatgactcgtatcgacatgagtgaatatcaagagaaattcagtgccactcgtctcatcggttcccctccgggatatgttggatacgatgaaggcggtcaactgaccgaagcgatcaggcgtaaaccttattcggtagttttgttcgacgaaatagaaaaggctcaccccgacatcttcaacattctgttgcaggtactcgatgacggacgattgaccgataacaaaggccgattggttaatttcaaaaacaccattatcatcatgacttcgaatatgggttccgccttgatacgcgaaaattttgaaaagatgactcctgccaacaaaaccgaagtcatcgaaaaaacaaaagaagcggtcttgaatatgttgaaacaaaccatacgtcccgaatttctcaaccgtatagacgaaacgattatgttcaccccgttgagcgagaaagaaatcgaagagattgtgtcgttacaaatcgacaacatcaaaaagatgttggagaaaaacggtgtcaccctcgaaattacacccaaagctctgggcttgattgcagccgaaggctacgaccctgagtttggagcacgtccggtaaaacgagtgatacaccggcttatcttgaaccagttgtcgaaagacctgctggctcagaaagtagaccgatcgaagcctatcatagtcgataccgaaaatgaccaaatcgtatttcgtaactgaaacgagataaaaagcaaaggctgctatgcattgcatagcagcctttctttcctaccgaaaacctatttattcactgttctttatttttctacattcttttcactccacggcaagggattaagacgcccctgcttcatatctttccccataaatggagccctaaatctttcacgccaagaatcgcgggctgctcgtttttccaatcgtgccactttctgttccaaatactgaatatactgatctttggtcagaatagatttaaatgtggaatcccgacgaaccttagccgctttcatcgattctcgattcgatttctcaaattccttctttttctctcgaatcgcttttacttccgtatcgaacgtcttatcggcttcttttaattgagaaagctgtttttcgctaagattcaaatctttcaccatttgttcacaagggaattcacatttctctctccgttcgttcttttctttattaccggcaaatgaactcatcgataaaacgagaacaagagcgaacgatactattgcctttttcataaattttctcctttcattaaaaagttttcttcaatttatttattcgcgaatctgtttataagactctgtttttgtccaaaggtttaaccacactttctgcggaatgtttaaatttagcacttttaacaaaatggagaattgttactcccgaattaagtctttcaacttaatagcttggaaagtcatgtgagccacgctactctcatataaaatacccactgtctcacgatcgatcatggtcagacaggtatacccccacccctcatcttcgtccaacatcacttgattttctggcaaccacgtcaggcctttatctaaactggctttaatcgtaatatggttgcgccccttcttcgtgttgggattcgagaaaagaaggatatccctacccaatacattatcttcggcacgaacatgaatcagactcgccatacacacaggttcttgcaaagcttttcgggacgactcatgctcggtccatgtttttcccaaatcctcggttatggctacggctcggcttccaccccggttatcccgcatattcaacatcaacacccccggctctatctccacgacctgagcctctgtcgtatttgtccgtgccagattatgtatattccaagttttaccccggtccttactatacataataccagcattcggaatacgagtcgaatctatgaactgaatgggaaataccaacgtgccggcctgcatggtaatacctcgtcccggcccttgaagtaggaaataccaagaaggatctttcacctgcccggttatatcaatcggcttcgaccaagttttgccgtcatcggtactcttcgtcatcacgagttgagccgtatagctcttttccattcccggctgtgaactccaccatgcccgttgattccccataccgtgtgtccacgccgcgacaatccacactgtatttgtctttgtatcaaccaagatagaagggtctcctaccccattttgggcagccggcaagcctccggtctctccgaaagaaagcggcaatctcattttctcccatgttctcccgccatcggtactacggctcaatccaacatctacatgttcttgcagatccacgctactgttataacgcacatcgtacacacccaacaatgtacctttattcgtagtgaccaatccgggaatacgaaacgccgaaacaccgtcgttaccagcatgacgaacgcctactcccatgcggtgtacaataccgtcgggcgacatttttttacaaacagcctctttcccgtctattgtcacagaactcaaatctgccgtcaccttagataaaagagatgtaccgggtttcacctgcaaactcacccaaaagaaattaactcccggaaataatttgtaattacatttcaaaaccaccgactcagacacattcgattcctcggcacattttatcgaataagaaggatatgccgacaatgtcttaccgggactgaaactcgaaatataactaaccggagcaaatcgattcttatcttcctcttgacgggcttctgttccaccataatagagcttcacagattgaatatcgtcgagatttttacacctcgacaaatctactgttactccatcaagcattcggctgtctcgtgcatcgaatcgaagataaaataatagattatcctgccgttctatcaaaatggggacttgtgcctcttttataaaaaccgtatccgaagctcttactaccgaccaatatccaattaacaagaaaaaaagaaaaagtctcttcatgacatatctaattaaatttgcggaataaagataacagttttttacttattactccaaaaaccagccgattttcatacttctcataaacggctctatctttccgtttctttccttgcaaaaacggtccaaaacaagtatatttgtatcaacagaaacaagtaatttatgttacaacctctggcagaaagactaaggcccaaaaacttagacgaatacatcggacaggaacatctggtaggaccgggagccgtactgcggcgtatgatcgatgggggaaaaatttcgtctttcattctttgggggcctccgggtgttggaaaaacaactctggcccacatcatatcgcaacaattacaagcaccgttcttcacattgagtgccgtacaatccggcgtaaaagaagttcgcgaagtaatagaccgatgcaaagccaatattttttccaaagtacgtcccatattgtttatcgatgaaatccaccggttcagtaaatcacagcaagactctctcctcggcgcggtcgaatacggtacggtgacgctcatcggagcaacgaccgagaatccctctttcgaagtaatacgccccttgctctcccgttgtcaggtatatgtcctcaaatcactcgaagtaaagcacttgcagctactgctcgacagagctatacattccgatacttatctgaaagaacgcgatatagaagtaaaagagaccgatgctctatttcgttattcaggaggggatgcccgaaagctgctaaatatcatcgatctcgtatcccaagcggtcggagagaacgaaaaaataatcatcgacgatgcgattgtaacggaacggttacaacaaaatcctgccgcctacgacaaaaacggcgaaatgcactacgatatcatatcggcatttatcaaatccatacgtggcagcgatccggatgccgcaatctattggcttgcccgcatggtcgaaggaggtgaagaccccgctttcatcgcacgacgattggttatattggcttccgaagatgtaggactggcaaaccccaatgccttgcttttagccaacgcttgcttcgatgctgtacaaaatatagggtggccggagagccgcattatcatggccgaaacgacaatctatctggctagttcacccaaaagcaattcggcctacatggcgataaatcaagcactggaaacggtaaaagcaacaggaaaccttcctgttccgttacatcttaggaatgcaccgacacaattgatgaaagagttggagtatggaaaaaattacaaatatgcacacgattatacgggtaacttcgtcaatcagcaatatttaccaaacgagttgaaagacaataattggtggaagcctcaggataacgttgcggagaacaagctgaaagatcatctaaacaagctatggaaagaccgatacaaataatctgtcgaaatgctatctcgggctaacaaatagccgtcattttgtaaatttttgtaacaaaatatttcaaagcacagaaaaactaagaaaaaaagaattacttttgtaatctatcaaaaccaaattataccaaactactaaacaaagatcgttatgaagaagcacaatttctatgcaggcccttctattctgagcgaatacaccattaaaaacacagcggatgccgttcttaatttcgcagatacaggtctgtctctgttggaaatttcacatcgtagcaaagaatttacagcggttatcgaagaagctaaaaccctagtaaaagagttgctcgaagtccctgccggatatgatgtcctatttttaggtggaggggccagcatgcaattctgtatggttccatataatttgttgaaccgtaaagctgcttacctcgaaaccggaacatgggctgtaaatgcaatcaaagaagctaaattgttcggagaagtagatgtcgtcgcttcttcgaaagaagccaacttctcttatatccccaaaggatatactgtccccgatgatgttgattatttccactttacctccaacaacacgatatacggaacagaaatgcgatttgacccagacgtaaatgtacctcttgtagccgatatgtcttccgatattttctcccgacctatcgacgtttccaaatataacgtcatctacgccggagctcaaaaaaatttagcccctgccggagttactatcgtgattgtcaaagaagatgctctcggacatgtagaccgggctatccccaccatgctcgactatcgtacccacatcaaaaaagggtcgatgttcaatacgcctccttgtctccccatctactcggcattgcagaccttgaaatattataaggagatgggtggtatcaaagagatggaaaaacgtgatttggaaaaagcagcaatcctctacgatgctatcgattccagtaaaattttcgtcggaacagcagctcacgaagatcgctccatcatgaatgtctgcttcgttatgaaagaagaatacaaagacctcgaaagtgaatttatcgaatttgcttcctctcaaggcatggtgggtattaaaggacaccgttcggtaggtggattcagagcttccatttataatgctatgcctaaatcgagtgtcgaagccctcgtagctaccatgaaagaatttgagaagaaacactaatatagaaaagccatgaaagtattagttgctactgaaaagccgtttgccgctgttgcagtaaatggaatcaaagaagttctcgacaacgcaggtgtcgaaatggttcttttggaaaaataccccgataaggccgctctactaaaagcagtcgaagatgttgacggcctcatcgtgcgcagcgacatcgtcgatgccgaagtttttgacgctgccccaaaattaaaaatcgtagtacgtgccggagcgggttatgacaatatcgacctcaacgcggctacgaccaaagg
